(19) United States
(12) Patent Application Publication
(10) Pub. No.: US 2021/0403579 A1
(43) Pub. Date: Dec. 30, 2021

(54) MULTIVALENT REGULATORY T CELL MODULATORS

(71) Applicant: Delinia, Inc., Emeryville, CA (US)

(72) Inventors: Jungmin Kim, Berkeley, CA (US); Niranjana Nagarajan, Oakland, CA (US); Jeffrey Greve, Berkeiey, CA (US)

(73) Assignee: Delinia, Inc., Emeryville, CA (US)

(21) Appl. No.: 17/290,129

(22) PCT Filed: Oct. 30, 2019
(86) PCT No.: PCT/US2019/058854

§ 371 Date: Apr. 29, 2021

Related U.S. Application Data
(60) Provisional application No. 62/753,397, filed on Oct. 31, 2018.

(51) Int. Cl. C07K 16/28; C07K 14/55; A61P 1/00

(52) U.S. Cl. CPC C07K 16/2866; C07K 14/55; A61P 1/00; A61K 2039/505; C07K 2319/30; C07K 2317/21; C07K 2317/31

(57) ABSTRACT

This disclosure provides compounds that contain an IL-2 receptor-binding domain and an ST2-binding domain, e.g. an antibody or fragment thereof that specifically binds ST2. The methods described in the present disclosure provide for a method for treating a condition by administering to a subject in need thereof a therapeutically-effective amount of a compound containing an IL-2 receptor-binding domain and an ST2-binding domain.

### RELATED APPLICATIONS

[0001] This application claims priority to U.S. Provisional Patent Application No. 62/753,397 filed on Oct. 31, 2018, the contents of which are incorporated herein in their entirety.

### SUBMISSION OF SEQUENCE LISTING

[0002] The Sequence Listing associated with this application is filed in electronic format via EFS-Web and hereby incorporated by reference into the specification in its entirety. The name of the text file containing the Sequence Listing is 127754_00820_Sequence_Listing. The size of the text file is 1158 KB, and the text file was created on Oct. 30, 2019.

### BACKGROUND OF THE INVENTION

[0003] Inflammatory myopathies are conditions that are characterized by chronic muscle inflammation and muscle weakness. Muscular dystrophies are degenerative muscle diseases caused by a mutated dystrophin gene, but an underlying cause of the progressive degeneration is muscle inflammation. The inflammation associated with these diseases can damage muscle fibers, causing fatigue, pain, and progressive muscle degeneration. Regulatory T cells (Tregs) are a specialized subset of T cells. Tregs suppress activation of the immune system and thereby regulate the self-tolerance of the immune system. Subsets of Tregs expressing defined molecular markers, such as the receptor ST2, are found in inflamed tissues, such as injured skeletal muscle and inflamed lungs. Expansion and activation of ST2-expressing Tregs have been implicated in the resolution of acute muscle injury and of muscle inflammation associated with muscular dystrophy. Additionally, ST2+ Tregs are found in tissues such as visceral adipose, colon, and lung, and possess immunoregulatory and tissue repair functions in those tissues.

### SUMMARY OF THE INVENTION

[0004] In one aspect, the disclosure relates to a fusion protein comprising: a) a human IL-2 protein domain; b) an immunoglobulin Fc protein domain; and c) a protein domain that binds to Interleukin 1 receptor-like 1 (ST2). In certain embodiments, the protein domain that binds to ST2 is an antibody specific for ST2, or an antigen-binding fragment thereof. In certain embodiments, the fusion protein further comprises at least one peptide linker domain. In certain embodiments, the human IL-2 protein domain comprises human IL-2 with a substitution selected from the group consisting of: T3A, N88R, N88G, D20H, C125S, Q126L, and Q126F, relative to the amino acid sequence of SEQ ID NO: 2. In certain embodiments, the immunoglobulin Fc protein domain comprises an amino acid sequence selected from the group consisting of the human IgG1 Fc variant of SEQ ID NO: 4, SEQ ID NO: 5, SEQ ID NO: 7, SEQ ID NO: 8 or SEQ ID NO: 9. In certain embodiments, the fusion protein comprises a human IgG1 heavy chain listed in Table 1, or a fragment thereof. In certain embodiments, the antibody specific for ST2, or the antigen-binding fragment thereof, comprises an IgG1 heavy chain fragment listed in Table 2. In certain embodiments, the peptide linker domain comprises the amino acid sequence of SEQ ID NO: 6. In certain embodiments, the fusion protein comprises a first peptide linker domain and a second peptide linker domain.

[0005] In certain embodiments of the fusion proteins described herein, each domain has an amino-terminus (N-terminus) and a carboxy terminus (C-terminus); wherein the fusion protein is configured so that a) the C-terminus of the human IL-2 protein domain is fused through a peptide bond to the N-terminus of the first peptide linker domain; b) the N-terminus of the IgG Fc protein domain is fused through a peptide bond to the C-terminus of the first peptide linker domain; c) the N-terminus of the second peptide linker domain is fused through a peptide bond to the C-terminus of the IgG Fc protein domain; and d) the N-terminus of the protein domain that binds to ST2 is fused through a peptide bond to the C-terminus of the second peptide linker domain. In certain embodiments, the fusion protein comprises the amino acid sequence of SEQ ID NO: 12, SEQ ID NO: 13, SEQ ID NO: 14, or SEQ ID NO: 15.

[0006] In one aspect, the disclosure relates to a nucleic acid encoding a fusion protein described herein.

[0007] In one aspect, the disclosure relates to a dimeric protein comprising a fusion protein described herein. In certain embodiments, the dimeric protein comprises a first fusion protein and a second fusion protein, wherein: each fusion protein comprises an immunoglobulin (IgG) Fc protein domain and at least one additional protein domain selected from the group consisting of i. a human IL-2 protein domain; and ii. a protein domain that binds to Interleukin 1 receptor-like 1 (ST2); and b. the dimeric protein comprises at least one human IL-2 protein domain and at least one protein domain that binds to ST2. In certain embodiments, the first fusion protein comprises a human IL-2 protein domain, a first immunoglobulin Fc protein domain, and a first peptide linker; and the second fusion protein comprises a protein domain that binds to ST2, a second immunoglobulin Fc protein domain, and a second peptide linker domain. In certain embodiments, a. each domain has an amino-terminus (N-terminus) and a carboxy terminus (C-terminus); b. the first fusion protein is configured so that i. the C-terminus of the human IL-2 protein domain is fused through a peptide bond to the N-terminus of the first peptide linker domain; and ii. the N-terminus of the first IgG Fc protein domain is fused through a peptide bond to the C-terminus of the first peptide linker domain; and c. the second fusion protein is configured so that i. the C-terminus of the second IgG Fc protein domain is fused through a peptide bond to the N-terminus of the second peptide linker domain; and ii. the N-terminus of the protein domain that binds to ST2 is fused through a peptide bond to the C-terminus of the second peptide linker domain. In certain embodiments, the protein domain that binds to ST2 is an antibody specific for ST2, or an antigen-binding fragment thereof. In certain embodiments, at least one of the fusion proteins comprises a human IgG1 ST2 antibody listed in Table 1. In certain embodiments, the antibody specific for ST2, or the antigen-binding fragment thereof, comprises an IgG1 heavy chain fragment listed in Table 2. In certain embodiments, the antibody specific for ST2, or the antigen-binding fragment thereof, comprises a light chain amino acid sequence listed in Table 1. In certain embodiments, at least one of the fusion proteins further comprises at least one peptide linker domain. In certain embodiments, the human IL-2 protein domain comprises human IL-2 with a substitution selected from the group consisting of: T3A, N88R, N88G, D20H, C125S, Q126L, and Q126F, relative to the amino acid sequence of SEQ ID NO: 2. In certain embodiments, the immunoglobulin Fc protein domain comprises an amino acid sequence selected from the group consisting of the human IgG1 Fc variant of SEQ ID NO: 4, SEQ ID NO: 5, SEQ ID NO: 7, SEQ ID NO: 8 or SEQ ID NO: 9. In certain embodiments, the peptide linker domain comprises the amino acid sequence of SEQ ID NO: 6.

[0008] In certain embodiments, a. the first fusion protein and the second fusion protein each comprise the amino acid sequence of SEQ ID NO: 12, and the dimeric protein further comprises the amino acid sequence of SEQ ID NO: 19; b. the first fusion protein and the second fusion protein each comprise the amino acid sequence of SEQ ID NO: 13, and the dimeric protein further comprise the amino acid sequence of SEQ ID NO: 20; c. the first fusion protein comprises the amino acid sequence of SEQ ID NO: 16, the second fusion protein comprises the amino acid sequence of SEQ ID NO: 14, and the dimeric protein further comprises the amino acid sequence of SEQ ID NO: 19; d. the first fusion protein comprises the amino acid sequence of SEQ ID NO: 17, the second fusion protein comprises the amino acid sequence of SEQ ID NO: 15, and the dimeric protein further comprises the amino acid sequence of SEQ ID NO: 20; e. the first fusion protein comprises the amino acid sequence of SEQ ID NO: 16, the second fusion protein comprises the amino acid sequence of SEQ ID NO: 11, and the dimeric protein further comprises the amino acid sequence of SEQ ID NO: 19; f. the first fusion protein comprises the amino acid sequence of SEQ ID NO: 17, the second fusion protein comprises the amino acid sequence of SEQ ID NO: 11, and the dimeric protein further comprises the amino acid sequence of SEQ ID NO: 20; g. the first fusion protein comprises the amino acid sequence of SEQ ID NO: 16, the second fusion protein comprises the amino acid sequence of SEQ ID NO: 10, and the dimeric protein further comprises the amino acid sequence of SEQ ID NO: 19; h. the first fusion protein comprises the amino acid sequence of SEQ ID NO: 17, the second fusion protein comprises the amino acid sequence of SEQ ID NO: 10, and the dimeric protein further comprises the amino acid sequence of SEQ ID NO: 20; i. the first fusion protein comprises the amino acid sequence of SEQ ID NO: 18, the second fusion protein comprises the amino acid sequence of SEQ ID NO: 14, and the dimeric protein further comprises the amino acid sequence of SEQ ID NO: 19; or j. the first fusion protein comprises the amino acid sequence of SEQ ID NO: 18, the second fusion protein comprises the amino acid sequence of SEQ ID NO: 15, and the dimeric protein further comprises the amino acid sequence of SEQ ID NO: 20.

[0009] In one aspect, the disclosure relates to a pharmaceutical composition comprising a dimeric protein as disclosed herein. In one aspect, the disclosure relates to a method for treating a condition, the method comprising administering to a subject in need thereof a therapeutically-effective amount of the pharmaceutical composition as disclosed herein. In certain embodiments, the condition is selected from the group consisting of an inflammatory myopathy, muscular dystrophy, polymyositis, dermatomyositis, an inflammatory condition of adipose tissue, an inflammatory condition of the colon, an inflammatory condition of the lung, Graft-vs-Host Disease, Pemphigus Vulgaris, Systemic Lupus Erythematosus, Scleroderma, Ulcerative Colitis, Crohn's Disease, Psoriasis, Type 1 Diabetes, Multiple Sclerosis, Amyotrophic Lateral Sclerosis, Alopecia Areata, Uveitis, Neuromyelitis Optica, and Duchenne Muscular Dystrophy. In certain embodiments, the administration is subcutaneous.

[0010] In one aspect, the disclosure relates to a method of selectively activating an ST2⁺ regulatory T cell relative to an ST2⁻ regulatory T cell in a subject, the method comprising administering to the subject a therapeutically effective amount of a pharmaceutical composition as disclosed herein.

[0011] In certain aspects the disclosure relates to a recombinant antibody or an antigen-binding fragment thereof that specifically binds ST2, comprising:

(i) a light chain variable region having at least 85%, 90%, 95%, 96%, 97%, 98% or 99% sequence identity to an amino acid sequence selected from the group consisting of:
amino acids 21-132 of SEQ ID NO: 241, amino acids 21-132 of SEQ ID NO: 243,
amino acids 21-128 of SEQ ID NO: 245, amino acids 21-127 of SEQ ID NO: 247,
amino acids 21-127 of SEQ ID NO: 249, amino acids 21-127 of SEQ ID NO: 251,
amino acids 21-131 of SEQ ID NO: 253, amino acids 21-132 of SEQ ID NO: 255,
amino acids 21-127 of SEQ ID NO: 257, amino acids 21-132 of SEQ ID NO: 259,
amino acids 21-127 of SEQ ID NO: 261, amino acids 21-127 of SEQ ID NO: 263,
amino acids 21-132 of SEQ ID NO: 265, amino acids 21-132 of SEQ ID NO: 267,
amino acids 21-127 of SEQ ID NO: 269, amino acids 21-127 of SEQ ID NO: 271,
amino acids 21-127 of SEQ ID NO: 273, amino acids 21-127 of SEQ ID NO: 275,
amino acids 21-127 of SEQ ID NO: 277, amino acids 21-127 of SEQ ID NO: 279,
amino acids 21-127 of SEQ ID NO: 281, amino acids 21-127 of SEQ ID NO: 283,
amino acids 21-127 of SEQ ID NO: 285, amino acids 21-132 of SEQ ID NO: 287,
amino acids 21-127 of SEQ ID NO: 289, amino acids 21-133 of SEQ ID NO: 291,
amino acids 21-127 of SEQ ID NO: 293, amino acids 21-132 of SEQ ID NO: 295,
amino acids 21-127 of SEQ ID NO: 297, amino acids 21-132 of SEQ ID NO: 299,
amino acids 21-127 of SEQ ID NO: 301, amino acids 21-127 of SEQ ID NO: 303,
amino acids 21-132 of SEQ ID NO: 305, amino acids 21-127 of SEQ ID NO: 307,
amino acids 21-127 of SEQ ID NO: 309, amino acids 21-127 of SEQ ID NO: 311,
amino acids 21-127 of SEQ ID NO: 313, amino acids 21-128 of SEQ ID NO: 315,
amino acids 21-132 of SEQ ID NO: 317, amino acids 21-127 of SEQ ID NO: 319,
amino acids 21-133 of SEQ ID NO: 321, amino acids 21-127 of SEQ ID NO: 323,
amino acids 21-127 of SEQ ID NO: 325, amino acids 21-127 of SEQ ID NO: 327,
amino acids 21-127 of SEQ ID NO: 329, amino acids 21-127 of SEQ ID NO: 331,
amino acids 21-127 of SEQ ID NO: 333, amino acids 21-127 of SEQ ID NO: 335,
amino acids 21-127 of SEQ ID NO: 337, amino acids 21-127 of SEQ ID NO: 339,
amino acids 21-128 of SEQ ID NO: 341, amino acids 21-131 of SEQ ID NO: 343,
amino acids 21-127 of SEQ ID NO: 345, amino acids 21-131 of SEQ ID NO: 347,
amino acids 21-132 of SEQ ID NO: 349, amino acids 21-127 of SEQ ID NO: 351,
amino acids 21-127 of SEQ ID NO: 353, amino acids 21-127 of SEQ ID NO: 355,
amino acids 21-127 of SEQ ID NO: 357, amino acids 21-127 of SEQ ID NO: 359,
amino acids 21-132 of SEQ ID NO: 361, amino acids 21-133 of SEQ ID NO: 363,
amino acids 21-132 of SEQ ID NO: 365, amino acids 21-126 of SEQ ID NO: 367,
amino acids 21-127 of SEQ ID NO: 369, amino acids 21-132 of SEQ ID NO: 371,
amino acids 21-127 of SEQ ID NO: 373, amino acids 21-132 of SEQ ID NO: 375,
amino acids 21-132 of SEQ ID NO: 377, amino acids 21-128 of SEQ ID NO: 379,
amino acids 21-127 of SEQ ID NO: 381, amino acids 21-127 of SEQ ID NO: 383,
amino acids 21-127 of SEQ ID NO: 385, amino acids 21-127 of SEQ ID NO: 387,
amino acids 21-127 of SEQ ID NO: 389, amino acids 21-127 of SEQ ID NO: 391,
amino acids 21-133 of SEQ ID NO: 393, amino acids 21-127 of SEQ ID NO: 395,
amino acids 21-127 of SEQ ID NO: 397, amino acids 21-132 of SEQ ID NO: 399,
amino acids 21-127 of SEQ ID NO: 401, amino acids 21-127 of SEQ ID NO: 403,
amino acids 21-127 of SEQ ID NO: 405, amino acids 21-132 of SEQ ID NO: 407,
amino acids 21-127 of SEQ ID NO: 409, amino acids 21-127 of SEQ ID NO: 411,
amino acids 21-127 of SEQ ID NO: 413, amino acids 21-127 of SEQ ID NO: 415,
amino acids 21-127 of SEQ ID NO: 417, amino acids 21-132 of SEQ ID NO: 419,
amino acids 21-127 of SEQ ID NO: 421, amino acids 21-133 of SEQ ID NO: 423,
amino acids 21-132 of SEQ ID NO: 425, amino acids 21-128 of SEQ ID NO: 427,
amino acids 21-132 of SEQ ID NO: 429, amino acids 21-132 of SEQ ID NO: 431,
amino acids 21-127 of SEQ ID NO: 433, amino acids 21-127 of SEQ ID NO: 435,
amino acids 21-127 of SEQ ID NO: 437, amino acids 21-127 of SEQ ID NO: 439,
amino acids 21-126 of SEQ ID NO: 441, amino acids 21-132 of SEQ ID NO: 443,
amino acids 21-127 of SEQ ID NO: 445, amino acids 21-127 of SEQ ID NO: 447,
amino acids 21-127 of SEQ ID NO: 449, amino acids 21-128 of SEQ ID NO: 451,
amino acids 21-127 of SEQ ID NO: 453, amino acids 21-127 of SEQ ID NO: 455 and
amino acids 21-133 of SEQ ID NO: 457; and
(ii) a heavy chain variable region having at least 90%, 95%, 96%, 97%, 98%, or 99% sequence identity to an amino acid sequence selected from the group consisting of:
amino acids 25-147 of SEQ ID NO: 23, amino acids 25-147 of SEQ ID NO: 25,
amino acids 25-145 of SEQ ID NO: 27, amino acids 25-148 of SEQ ID NO: 29,
amino acids 25-141 of SEQ ID NO: 31, amino acids 25-143 of SEQ ID NO: 33,
amino acids 25-150 of SEQ ID NO: 35, amino acids 25-148 of SEQ ID NO: 37,
amino acids 25-146 of SEQ ID NO: 39, amino acids 25-145 of SEQ ID NO: 41,
amino acids 25-143 of SEQ ID NO: 43, amino acids 25-151 of SEQ ID NO: 45,
amino acids 25-141 of SEQ ID NO: 47, amino acids 25-140 of SEQ ID NO: 49,
amino acids 25-145 of SEQ ID NO: 51, amino acids 25-152 of SEQ ID NO: 53,
amino acids 25-142 of SEQ ID NO: 55, amino acids 25-147 of SEQ ID NO: 57,
amino acids 25-141 of SEQ ID NO: 59, amino acids 25-148 of SEQ ID NO: 61,
amino acids 25-142 of SEQ ID NO: 63, amino acids 25-145 of SEQ ID NO: 65,
amino acids 25-140 of SEQ ID NO: 67, amino acids 25-145 of SEQ ID NO: 69,
amino acids 25-140 of SEQ ID NO: 71, amino acids 25-140 of SEQ ID NO: 73,
amino acids 25-145 of SEQ ID NO: 75, amino acids 25-143 of SEQ ID NO: 77,
amino acids 25-143 of SEQ ID NO: 79, amino acids 25-151 of SEQ ID NO: 81,
amino acids 25-142 of SEQ ID NO: 83, amino acids 25-144 of SEQ ID NO: 85,
amino acids 25-148 of SEQ ID NO: 87, amino acids 25-144 of SEQ ID NO: 89,
amino acids 25-140 of SEQ ID NO: 91, amino acids 25-143 of SEQ ID NO: 93,
amino acids 25-150 of SEQ ID NO: 95, amino acids 25-147 of SEQ ID NO: 97,
amino acids 25-141 of SEQ ID NO: 99, amino acids 25-153 of SEQ ID NO: 101,
amino acids 25-152 of SEQ ID NO: 103, amino acids 25-145 of SEQ ID NO: 105,
amino acids 25-144 of SEQ ID NO: 107, amino acids 25-146 of SEQ ID NO: 109,
amino acids 25-140 of SEQ ID NO: 111, amino acids 25-143 of SEQ ID NO: 113,
amino acids 25-144 of SEQ ID NO: 115, amino acids 25-141 of SEQ ID NO: 117,
amino acids 25-149 of SEQ ID NO: 119, amino acids 25-145 of SEQ ID NO: 121,
amino acids 25-149 of SEQ ID NO: 123, amino acids 25-149 of SEQ ID NO: 125,
amino acids 25-147 of SEQ ID NO: 127, amino acids 25-147 of SEQ ID NO: 129,
amino acids 25-145 of SEQ ID NO: 131, amino acids 25-146 of SEQ ID NO: 133,
amino acids 25-152 of SEQ ID NO: 135, amino acids 25-146 of SEQ ID NO: 137,
amino acids 25-149 of SEQ ID NO: 139, amino acids 25-149 of SEQ ID NO: 141,
amino acids 25-145 of SEQ ID NO: 143, amino acids 25-142 of SEQ ID NO: 145,
amino acids 25-147 of SEQ ID NO: 147, amino acids 25-141 of SEQ ID NO: 149,
amino acids 25-140 of SEQ ID NO: 151, amino acids 25-145 of SEQ ID NO: 153,
amino acids 25-153 of SEQ ID NO: 155, amino acids 25-146 of SEQ ID NO: 157,
amino acids 25-149 of SEQ ID NO: 159, amino acids 25-141 of SEQ ID NO: 161,
amino acids 25-156 of SEQ ID NO: 163, amino acids 25-141 of SEQ ID NO: 165,
amino acids 25-140 of SEQ ID NO: 167, amino acids 25-140 of SEQ ID NO: 169,
amino acids 25-141 of SEQ ID NO: 171, amino acids 25-140 of SEQ ID NO: 173,
amino acids 25-144 of SEQ ID NO: 175, amino acids 25-142 of SEQ ID NO: 177,
amino acids 25-145 of SEQ ID NO: 179, amino acids 25-145 of SEQ ID NO: 181,
amino acids 25-143 of SEQ ID NO: 183, amino acids 25-147 of SEQ ID NO: 185,
amino acids 25-143 of SEQ ID NO: 187, amino acids 25-145 of SEQ ID NO: 189,
amino acids 25-144 of SEQ ID NO: 191, amino acids 25-143 of SEQ ID NO: 193,
amino acids 25-146 of SEQ ID NO: 195, amino acids 25-141 of SEQ ID NO: 197,
amino acids 25-146 of SEQ ID NO: 199, amino acids 25-142 of SEQ ID NO: 201,
amino acids 25-139 of SEQ ID NO: 203, amino acids 25-144 of SEQ ID NO: 205,
amino acids 25-146 of SEQ ID NO: 207, amino acids 25-142 of SEQ ID NO: 209,
amino acids 25-151 of SEQ ID NO: 211, amino acids 25-141 of SEQ ID NO: 213,
amino acids 25-140 of SEQ ID NO: 215, amino acids 25-146 of SEQ ID NO: 217,
amino acids 25-142 of SEQ ID NO: 219, amino acids 25-143 of SEQ ID NO: 221,
amino acids 25-150 of SEQ ID NO: 223, amino acids 25-144 of SEQ ID NO: 225,
amino acids 25-145 of SEQ ID NO: 227, amino acids 25-149 of SEQ ID NO: 229,
amino acids 25-147 of SEQ ID NO: 231, amino acids 25-140 of SEQ ID NO: 233,
amino acids 25-141 of SEQ ID NO: 235, amino acids 25-140 of SEQ ID NO: 237, and
amino acids 25-150 of SEQ ID NO: 239.

[0012] In certain embodiments, the antibody or antigen-binding fragment comprises:

a light chain variable region comprising amino acids 21-132 of SEQ ID NO: 241 and a heavy chain variable region comprising amino acids 25-147 of SEQ ID NO: 23;
a light chain variable region comprising amino acids 21-132 of SEQ ID NO: 243 and a heavy chain variable region comprising amino acids 25-147 of SEQ ID NO: 25;
a light chain variable region comprising amino acids 21-128 of SEQ ID NO: 245 and a heavy chain variable region comprising amino acids 25-145 of SEQ ID NO: 27;
a light chain variable region comprising amino acids 21-127 of SEQ ID NO: 247 and a heavy chain variable region comprising amino acids 25-148 of SEQ ID NO: 29;
a light chain variable region comprising amino acids 21-127 of SEQ ID NO: 249 and a heavy chain variable region comprising amino acids 25-141 of SEQ ID NO: 31;
a light chain variable region comprising amino acids 21-127 of SEQ ID NO: 251 and a heavy chain variable region comprising amino acids 25-143 of SEQ ID NO: 33;
a light chain variable region comprising amino acids 21-131 of SEQ ID NO: 253 and a heavy chain variable region comprising amino acids 25-150 of SEQ ID NO: 35;
a light chain variable region comprising amino acids 21-132 of SEQ ID NO: 255 and a heavy chain variable region comprising amino acids 25-148 of SEQ ID NO: 37;
a light chain variable region comprising amino acids 21-127 of SEQ ID NO: 257 and a heavy chain variable region comprising amino acids 25-146 of SEQ ID NO: 39;
a light chain variable region comprising amino acids 21-132 of SEQ ID NO: 259 and a heavy chain variable region comprising amino acids 25-145 of SEQ ID NO: 41;
a light chain variable region comprising amino acids 21-127 of SEQ ID NO: 261 and a heavy chain variable region comprising amino acids 25-143 of SEQ ID NO: 43;
a light chain variable region comprising amino acids 21-127 of SEQ ID NO: 263 and a heavy chain variable region comprising amino acids 25-151 of SEQ ID NO: 45;
a light chain variable region comprising amino acids 21-132 of SEQ ID NO: 265 and a heavy chain variable region comprising amino acids 25-141 of SEQ ID NO: 47;
a light chain variable region comprising amino acids 21-132 of SEQ ID NO: 267 and a heavy chain variable region comprising amino acids 25-140 of SEQ ID NO: 49;
a light chain variable region comprising amino acids 21-127 of SEQ ID NO: 269 and a heavy chain variable region comprising amino acids 25-145 of SEQ ID NO: 51;
a light chain variable region comprising amino acids 1-127 of SEQ ID NO: 271 and a heavy chain variable region comprising amino acids 25-152 of SEQ ID NO: 53;
a light chain variable region comprising amino acids 21-127 of SEQ ID NO: 273 and a heavy chain variable region comprising amino acids 25-142 of SEQ ID NO: 55;
a light chain variable region comprising amino acids 21-127 of SEQ ID NO: 275 and a heavy chain variable region comprising amino acids 25-147 of SEQ ID NO: 57;
a light chain variable region comprising amino acids 21-127 of SEQ ID NO: 277 and a heavy chain variable region comprising amino acids 25-141 of SEQ ID NO: 59;
a light chain variable region comprising amino acids 21-127 of SEQ ID NO: 279 and a heavy chain variable region comprising amino acids 25-148 of SEQ ID NO: 61;
a light chain variable region comprising amino acids 21-127 of SEQ ID NO: 281 and a heavy chain variable region comprising amino acids 25-142 of SEQ ID NO: 63;
a light chain variable region comprising amino acids 21-127 of SEQ ID NO: 283 and a heavy chain variable region comprising amino acids 25-145 of SEQ ID NO: 65;
a light chain variable region comprising amino acids 21-127 of SEQ ID NO: 285 and a heavy chain variable region comprising amino acids 25-140 of SEQ ID NO: 67;
a light chain variable region comprising amino acids 21-132 of SEQ ID NO: 287 and a heavy chain variable region comprising amino acids 25-145 of SEQ ID NO: 69;
a light chain variable region comprising amino acids 21-127 of SEQ ID NO: 289 and a heavy chain variable region comprising amino acids 25-140 of SEQ ID NO: 71;
a light chain variable region comprising amino acids 21-133 of SEQ ID NO: 291 and a heavy chain variable region comprising amino acids 25-140 of SEQ ID NO: 73;
a light chain variable region comprising amino acids 21-127 of SEQ ID NO: 293 and a heavy chain variable region comprising amino acids 25-145 of SEQ ID NO: 75;
a light chain variable region comprising amino acids 21-132 of SEQ ID NO: 295 and a heavy chain variable region comprising amino acids 25-143 of SEQ ID NO: 77;
a light chain variable region comprising amino acids 21-127 of SEQ ID NO: 297 and a heavy chain variable region comprising amino acids 25-143 of SEQ ID NO: 79;
a light chain variable region comprising amino acids 21-132 of SEQ ID NO: 299 and a heavy chain variable region comprising amino acids 25-151 of SEQ ID NO: 81;
a light chain variable region comprising amino acids 21-127 of SEQ ID NO: 301 and a heavy chain variable region comprising amino acids 25-142 of SEQ ID NO: 83;
a light chain variable region comprising amino acids 21-127 of SEQ ID NO: 303 and a heavy chain variable region comprising amino acids 25-144 of SEQ ID NO: 85;
a light chain variable region comprising amino acids 21-132 of SEQ ID NO: 305 and a heavy chain variable region comprising amino acids 25-148 of SEQ ID NO: 87;
a light chain variable region comprising amino acids 21-127 of SEQ ID NO: 307 and a heavy chain variable region comprising amino acids 25-144 of SEQ ID NO: 89;
a light chain variable region comprising amino acids 21-127 of SEQ ID NO: 309 and a heavy chain variable region comprising amino acids 25-140 of SEQ ID NO: 91;
a light chain variable region comprising amino acids 21-127 of SEQ ID NO: 311 and a heavy chain variable region comprising amino acids 25-143 of SEQ ID NO: 93;
a light chain variable region comprising amino acids 21-127 of SEQ ID NO: 313 and a heavy chain variable region comprising amino acids 25-150 of SEQ ID NO: 95;
a light chain variable region comprising amino acids 21-128 of SEQ ID NO: 315 and a heavy chain variable region comprising amino acids 25-147 of SEQ ID NO: 97;
a light chain variable region comprising amino acids 21-132 of SEQ ID NO: 317 and a heavy chain variable region comprising amino acids 25-141 of SEQ ID NO: 99;
a light chain variable region comprising amino acids 21-127 of SEQ ID NO: 319 and a heavy chain variable region comprising amino acids 25-153 of SEQ ID NO: 101;
a light chain variable region comprising amino acids 21-133 of SEQ ID NO: 321 and a heavy chain variable region comprising amino acids 25-152 of SEQ ID NO: 103;
a light chain variable region comprising amino acids 21-127 of SEQ ID NO: 323 and a heavy chain variable region comprising amino acids 25-145 of SEQ ID NO: 105;
a light chain variable region comprising amino acids 21-127 of SEQ ID NO: 325 and a heavy chain variable region comprising amino acids 25-144 of SEQ ID NO: 107;
a light chain variable region comprising amino acids 21-127 of SEQ ID NO: 327 and a heavy chain variable region comprising amino acids 25-146 of SEQ ID NO: 109;
a light chain variable region comprising amino acids 21-127 of SEQ ID NO: 329 and a heavy chain variable region comprising amino acids 25-140 of SEQ ID NO: 111;
a light chain variable region comprising amino acids 21-127 of SEQ ID NO: 331 and a heavy chain variable region comprising amino acids 25-143 of SEQ ID NO: 113;
a light chain variable region comprising amino acids 21-127 of SEQ ID NO: 333 and a heavy chain variable region comprising amino acids 25-144 of SEQ ID NO: 115;
a light chain variable region comprising amino acids 21-127 of SEQ ID NO: 335 and a heavy chain variable region comprising amino acids 25-141 of SEQ ID NO: 117;
a light chain variable region comprising amino acids 21-127 of SEQ ID NO: 337 and a heavy chain variable region comprising amino acids 25-149 of SEQ ID NO: 119;
a light chain variable region comprising amino acids 21-127 of SEQ ID NO: 339 and a heavy chain variable region comprising amino acids 25-145 of SEQ ID NO: 121;
a light chain variable region comprising amino acids 21-128 of SEQ ID NO: 341 and a heavy chain variable region comprising amino acids 25-149 of SEQ ID NO: 123;
a light chain variable region comprising amino acids 21-131 of SEQ ID NO: 343 and a heavy chain variable region comprising amino acids 25-149 of SEQ ID NO: 125;
a light chain variable region comprising amino acids 21-127 of SEQ ID NO: 345 and a heavy chain variable region comprising amino acids 25-147 of SEQ ID NO: 127;
a light chain variable region comprising amino acids 21-131 of SEQ ID NO: 347 and a heavy chain variable region comprising amino acids 25-147 of SEQ ID NO: 129;
a light chain variable region comprising amino acids 21-132 of SEQ ID NO: 349 and a heavy chain variable region comprising amino acids 25-145 of SEQ ID NO: 131;
a light chain variable region comprising amino acids 21-127 of SEQ ID NO: 351 and a heavy chain variable region comprising amino acids 25-146 of SEQ ID NO: 133;
a light chain variable region comprising amino acids 21-127 of SEQ ID NO: 353 and a heavy chain variable region comprising amino acids 25-152 of SEQ ID NO: 135;
a light chain variable region comprising amino acids 21-127 of SEQ ID NO: 355 and a heavy chain variable region comprising amino acids 25-146 of SEQ ID NO: 137;
a light chain variable region comprising amino acids 21-127 of SEQ ID NO: 357 and a heavy chain variable region comprising amino acids 25-149 of SEQ ID NO: 139;
a light chain variable region comprising amino acids 21-127 of SEQ ID NO: 359 and a heavy chain variable region comprising amino acids 25-149 of SEQ ID NO: 141;
a light chain variable region comprising amino acids 21-132 of SEQ ID NO: 361 and a heavy chain variable region comprising amino acids 25-145 of SEQ ID NO: 143;
a light chain variable region comprising amino acids 21-133 of SEQ ID NO: 363 and a heavy chain variable region comprising amino acids 25-142 of SEQ ID NO: 145;
a light chain variable region comprising amino acids 21-132 of SEQ ID NO: 365 and a heavy chain variable region comprising amino acids 25-147 of SEQ ID NO: 147;
a light chain variable region comprising amino acids 21-126 of SEQ ID NO: 367 and a heavy chain variable region comprising amino acids 25-141 of SEQ ID NO: 149;
a light chain variable region comprising amino acids 21-127 of SEQ ID NO: 369 and a heavy chain variable region comprising amino acids 25-140 of SEQ ID NO: 151;
a light chain variable region comprising amino acids 21-132 of SEQ ID NO: 371 and a heavy chain variable region comprising amino acids 25-145 of SEQ ID NO: 153;
a light chain variable region comprising amino acids 21-127 of SEQ ID NO: 373 and a heavy chain variable region comprising amino acids 25-153 of SEQ ID NO: 155;
a light chain variable region comprising amino acids 21-132 of SEQ ID NO: 375 and a heavy chain variable region comprising amino acids 25-146 of SEQ ID NO: 157;
a light chain variable region comprising amino acids 21-132 of SEQ ID NO: 377 and a heavy chain variable region comprising amino acids 25-149 of SEQ ID NO: 159;
a light chain variable region comprising amino acids 21-128 of SEQ ID NO: 379 and a heavy chain variable region comprising amino acids 25-141 of SEQ ID NO: 161;
a light chain variable region comprising amino acids 21-127 of SEQ ID NO: 381 and a heavy chain variable region comprising amino acids 25-156 of SEQ ID NO: 163;
a light chain variable region comprising amino acids 21-127 of SEQ ID NO: 383 and a heavy chain variable region comprising amino acids 25-141 of SEQ ID NO: 165;
a light chain variable region comprising amino acids 21-127 of SEQ ID NO: 385 and a heavy chain variable region comprising amino acids 25-140 of SEQ ID NO: 167;
a light chain variable region comprising amino acids 21-127 of SEQ ID NO: 387 and a heavy chain variable region comprising amino acids 25-140 of SEQ ID NO: 169;
a light chain variable region comprising amino acids 21-127 of SEQ ID NO: 389 and a heavy chain variable region comprising amino acids 25-141 of SEQ ID NO: 171;
a light chain variable region comprising amino acids 21-127 of SEQ ID NO: 391 and a heavy chain variable region comprising amino acids 25-140 of SEQ ID NO: 173;
a light chain variable region comprising amino acids 21-133 of SEQ ID NO: 393 and a heavy chain variable region comprising amino acids 25-144 of SEQ ID NO: 175;
a light chain variable region comprising amino acids 21-127 of SEQ ID NO: 395 and a heavy chain variable region comprising amino acids 25-142 of SEQ ID NO: 177;
a light chain variable region comprising amino acids 21-127 of SEQ ID NO: 397 and a heavy chain variable region comprising amino acids 25-145 of SEQ ID NO: 179;
a light chain variable region comprising amino acids 21-132 of SEQ ID NO: 399 and a heavy chain variable region comprising amino acids 25-145 of SEQ ID NO: 181;
a light chain variable region comprising amino acids 21-127 of SEQ ID NO: 401 and a heavy chain variable region comprising amino acids 25-143 of SEQ ID NO: 183;
a light chain variable region comprising amino acids 21-127 of SEQ ID NO: 403 and a heavy chain variable region comprising amino acids 25-147 of SEQ ID NO: 185;
a light chain variable region comprising amino acids 21-127 of SEQ ID NO: 405 and a heavy chain variable region comprising amino acids 25-143 of SEQ ID NO: 187;
a light chain variable region comprising amino acids 21-132 of SEQ ID NO: 407 and a heavy chain variable region comprising amino acids 25-145 of SEQ ID NO: 189;
a light chain variable region comprising amino acids 21-127 of SEQ ID NO: 409 and a heavy chain variable region comprising amino acids 25-144 of SEQ ID NO: 191;
a light chain variable region comprising amino acids 21-127 of SEQ ID NO: 411 and a heavy chain variable region comprising amino acids 25-143 of SEQ ID NO: 193;
a light chain variable region comprising amino acids 21-127 of SEQ ID NO: 413 and a heavy chain variable region comprising amino acids 25-146 of SEQ ID NO: 195;
a light chain variable region comprising amino acids 21-127 of SEQ ID NO: 415 and a heavy chain variable region comprising amino acids 25-141 of SEQ ID NO: 197;
a light chain variable region comprising amino acids 21-127 of SEQ ID NO: 417 and a heavy chain variable region comprising amino acids 25-146 of SEQ ID NO: 199;
a light chain variable region comprising amino acids 21-132 of SEQ ID NO: 419 and a heavy chain variable region comprising amino acids 25-142 of SEQ ID NO: 201;
a light chain variable region comprising amino acids 21-127 of SEQ ID NO: 421 and a heavy chain variable region comprising amino acids 25-139 of SEQ ID NO: 203;
a light chain variable region comprising amino acids 21-133 of SEQ ID NO: 423 and a heavy chain variable region comprising amino acids 25-144 of SEQ ID NO: 205;
a light chain variable region comprising amino acids 21-132 of SEQ ID NO: 425 and a heavy chain variable region comprising amino acids 25-146 of SEQ ID NO: 207;
a light chain variable region comprising amino acids 21-128 of SEQ ID NO: 427 and a heavy chain variable region comprising amino acids 25-142 of SEQ ID NO: 209;
a light chain variable region comprising amino acids 21-132 of SEQ ID NO: 429 and a heavy chain variable region comprising amino acids 25-151 of SEQ ID NO: 211;
a light chain variable region comprising amino acids 21-132 of SEQ ID NO: 431 and a heavy chain variable region comprising amino acids 25-141 of SEQ ID NO: 213;
a light chain variable region comprising amino acids 21-127 of SEQ ID NO: 433 and a heavy chain variable region comprising amino acids 25-140 of SEQ ID NO: 215;
a light chain variable region comprising amino acids 21-127 of SEQ ID NO: 435 and a heavy chain variable region comprising amino acids 25-146 of SEQ ID NO: 217;
a light chain variable region comprising amino acids 21-127 of SEQ ID NO: 437 and a heavy chain variable region comprising amino acids 25-142 of SEQ ID NO: 219;
a light chain variable region comprising amino acids 21-127 of SEQ ID NO: 439 and a heavy chain variable region comprising amino acids 25-143 of SEQ ID NO: 221;
a light chain variable region comprising amino acids 21-126 of SEQ ID NO: 441 and a heavy chain variable region comprising amino acids 25-150 of SEQ ID NO: 223;
a light chain variable region comprising amino acids 21-132 of SEQ ID NO: 443 and a heavy chain variable region comprising amino acids 25-144 of SEQ ID NO: 225;
a light chain variable region comprising amino acids 21-127 of SEQ ID NO: 445 and a heavy chain variable region comprising amino acids 25-145 of SEQ ID NO: 227;
a light chain variable region comprising amino acids 21-127 of SEQ ID NO: 447 and a heavy chain variable region comprising amino acids 25-149 of SEQ ID NO: 229;
a light chain variable region comprising amino acids 21-127 of SEQ ID NO: 449 and a heavy chain variable region comprising amino acids 251-147 of SEQ ID NO: 231;
a light chain variable region comprising amino acids 21-128 of SEQ ID NO: 451 and a heavy chain variable region comprising amino acids 25-140 of SEQ ID NO: 233;
a light chain variable region comprising amino acids 21-127 of SEQ ID NO: 453 and a heavy chain variable region comprising amino acids 25-141 of SEQ ID NO: 235;
a light chain variable region comprising amino acids 21-127 of SEQ ID NO: 455 and a heavy chain variable region comprising amino acids 25-140 of SEQ ID NO: 237; or
a light chain variable region comprising amino acids 21-133 of SEQ ID NO: 457 and a heavy chain variable region comprising amino acids 25-150 of SEQ ID NO: 239.

[0013] In certain embodiments, the antibody or antigen-binding fragment comprises a heavy chain fragment selected from the group consisting of:

amino acids 25-251 of SEQ ID NO: 23, amino acids 25-250 of SEQ ID NO: 25, amino acids 25-249 of SEQ ID NO: 27, amino acids 25-252 of SEQ ID NO: 29, amino acids 25-245 of SEQ ID NO: 31, amino acids 25-247 of SEQ ID NO: 33, amino acids 25-254 of SEQ ID NO: 35, amino acids 25-252 of SEQ ID NO: 37, amino acids 25-250 of SEQ ID NO: 39, amino acids 25-249 of SEQ ID NO: 41, amino acids 25-248 of SEQ ID NO: 43, amino acids 25-255 of SEQ ID NO: 45, amino acids 25-245 of SEQ ID NO: 47, amino acids 25-244 of SEQ ID NO: 49, amino acids 25-249 of SEQ ID NO: 51, amino acids 25-256 of SEQ ID NO: 53, amino acids 25-246 of SEQ ID NO: 55, amino acids 25-251 of SEQ ID NO: 57, amino acids 25-245 of SEQ ID NO: 59, amino acids 25-252 of SEQ ID NO: 61, amino acids 25-246 of SEQ ID NO: 63, amino acids 25-249 of SEQ ID NO: 65, amino acids 25-244 of SEQ ID NO: 67, amino acids 25-249 of SEQ ID NO: 69, amino acids 25-244 of SEQ ID NO: 71, amino acids 25-244 of SEQ ID NO: 73, amino acids 25-249 of SEQ ID NO: 75, amino acids 25-247 of SEQ ID NO: 77, amino acids 25-247 of SEQ ID NO: 79, amino acids 25-255 of SEQ ID NO: 81, amino acids 25-246 of SEQ ID NO: 83, amino acids 25-248 of SEQ ID NO: 85, amino acids 25-252 of SEQ ID NO: 87, amino acids 25-248 of SEQ ID NO: 89, amino acids 25-244 of SEQ ID NO: 91, amino acids 25-247 of SEQ ID NO: 93, amino acids 25-254 of SEQ ID NO: 95, amino acids 25-251 of SEQ ID NO: 97, amino acids 25-245 of SEQ ID NO: 99, amino acids 25-257 of SEQ ID NO: 101, amino acids 25-256 of SEQ ID NO: 103, amino acids 25-249 of SEQ ID NO: 105, amino acids 25-248 of SEQ ID NO: 107, amino acids 25-250 of SEQ ID NO: 109, amino acids 25-244 of SEQ ID NO: 111, amino acids 25-247 of SEQ ID NO: 113, amino acids 25-248 of SEQ ID NO: 115, amino acids 25-245 of SEQ ID NO: 117, amino acids 25-253 of SEQ ID NO: 119, amino acids 25-249 of SEQ ID NO: 121, amino acids 25-253 of SEQ ID NO: 123, amino acids 25-253 of SEQ ID NO: 125, amino acids 25-251 of SEQ ID NO: 127, amino acids 25-245 of SEQ ID NO: 129, amino acids 25-249 of SEQ ID NO: 131, amino acids 25-250 of SEQ ID NO: 133, amino acids 25-256 of SEQ ID NO: 135, amino acids 25-250 of SEQ ID NO: 137, amino acids 25-247 of SEQ ID NO: 139, amino acids 25-253 of SEQ ID NO: 141, amino acids 25-249 of SEQ ID NO: 143, amino acids 25-246 of SEQ ID NO: 145, amino acids 25-251 of SEQ ID NO: 147, amino acids 25-245 of SEQ ID NO: 149, amino acids 25-244 of SEQ ID NO: 151, amino acids 25-249 of SEQ ID NO: 153, amino acids 25-257 of SEQ ID NO: 155, amino acids 25-250 of SEQ ID NO: 157, amino acids 25-253 of SEQ ID NO: 159, amino acids 25-245 of SEQ ID NO: 161, amino acids 25-260 of SEQ ID NO: 163, amino acids 25-245 of SEQ ID NO: 165, amino acids 25-244 of SEQ ID NO: 167, amino acids 25-244 of SEQ ID NO: 169, amino acids 25-245 of SEQ ID NO: 171, amino acids 25-244 of SEQ ID NO: 173, amino acids 25-248 of SEQ ID NO: 175, amino acids 25-246 of SEQ ID NO: 177, amino acids 1-249 of SEQ ID NO: 179, amino acids 1-249 of SEQ ID NO: 181, amino acids 1-247 of SEQ ID NO: 183, amino acids 1-251 of SEQ ID NO: 185, amino acids 1-247 of SEQ ID NO: 187, amino acids 25-249 of SEQ ID NO: 189, amino acids 25-248 of SEQ ID NO: 191, amino acids 25-246 of SEQ ID NO: 193, amino acids 25-250 of SEQ ID NO: 195, amino acids 25-245 of SEQ ID NO: 197, amino acids 25-250 of SEQ ID NO: 199, amino acids 25-246 of SEQ ID NO: 201, amino acids 25-243 of SEQ ID NO: 203, amino acids 25-248 of SEQ ID NO: 205, amino acids 25-250 of SEQ ID NO: 207, amino acids 25-249 of SEQ ID NO: 209, amino acids 25-255 of SEQ ID NO: 211, amino acids 25-245 of SEQ ID NO: 213, amino acids 25-244 of SEQ ID NO: 215, amino acids 25-250 of SEQ ID NO: 217, amino acids 25-249 of SEQ ID NO: 219, amino acids 25-247 of SEQ ID NO: 221, amino acids 25-254 of SEQ ID NO: 223, amino acids 25-248 of SEQ ID NO: 225, amino acids 25-249 of SEQ ID NO: 227, amino acids 25-253 of SEQ ID NO: 229, amino acids 25-251 of SEQ ID NO: 231, amino acids 25-244 of SEQ ID NO: 233, amino acids 25-245 of SEQ ID NO: 235, amino acids 25-244 of SEQ ID NO: 237, and amino acids 25-254 of SEQ ID NO: 239.

[0014] In certain embodiments, the antibody or antigen-binding fragment comprises:

a heavy chain fragment comprising amino acids 25-251 of SEQ ID NO: 23 and a light chain comprising SEQ ID NO: 241;
a heavy chain fragment comprising amino acids 25-250 of SEQ ID NO: 25 and a light chain comprising SEQ ID NO: 243;
a heavy chain fragment comprising amino acids 25-249 of SEQ ID NO: 27 and a light chain comprising SEQ ID NO: 245;
a heavy chain fragment comprising amino acids 25-252 of SEQ ID NO: 29 and a light chain comprising SEQ ID NO: 247;
a heavy chain fragment comprising amino acids 25-245 of SEQ ID NO: 31 and a light chain comprising SEQ ID NO: 249;
a heavy chain fragment comprising amino acids 25-247 of SEQ ID NO: 33 and a light chain comprising SEQ ID NO: 251;
a heavy chain fragment comprising amino acids 25-254 of SEQ ID NO: 35 and a light chain comprising SEQ ID NO: 253;
a heavy chain fragment comprising amino acids 25-252 of SEQ ID NO: 37 and a light chain comprising SEQ ID NO: 255;
a heavy chain fragment comprising amino acids 25-250 of SEQ ID NO: 39 and a light chain comprising SEQ ID NO: 257;
a heavy chain fragment comprising amino acids 25-249 of SEQ ID NO: 41 and a light chain comprising SEQ ID NO: 259;
a heavy chain fragment comprising amino acids 25-248 of SEQ ID NO: 43 and a light chain comprising SEQ ID NO: 261;
a heavy chain fragment comprising amino acids 25-255 of SEQ ID NO: 45 and a light chain comprising SEQ ID NO: 263;
a heavy chain fragment comprising amino acids 25-245 of SEQ ID NO: 47 and a light chain comprising SEQ ID NO: 265;
a heavy chain fragment comprising amino acids 25-244 of SEQ ID NO: 49 and a light chain comprising SEQ ID NO: 267;
a heavy chain fragment comprising amino acids 25-249 of SEQ ID NO: 51 and a light chain comprising SEQ ID NO: 269;
a heavy chain fragment comprising amino acids 25-256 of SEQ ID NO: 53 and a light chain comprising SEQ ID NO: 271;
a heavy chain fragment comprising amino acids 25-246 of SEQ ID NO: 55 and a light chain comprising SEQ ID NO: 273;
a heavy chain fragment comprising amino acids 25-251 of SEQ ID NO: 57 and a light chain comprising SEQ ID NO: 275;
a heavy chain fragment comprising amino acids 25-245 of SEQ ID NO: 59 and a light chain comprising SEQ ID NO: 277;
a heavy chain fragment comprising amino acids 25-252 of SEQ ID NO: 61 and a light chain comprising SEQ ID NO: 279;
a heavy chain fragment comprising amino acids 25-246 of SEQ ID NO: 63 and a light chain comprising SEQ ID NO: 281;
a heavy chain fragment comprising amino acids 25-249 of SEQ ID NO: 65 and a light chain comprising SEQ ID NO: 283;
a heavy chain fragment comprising amino acids 25-244 of SEQ ID NO: 67 and a light chain comprising SEQ ID NO: 285;
a heavy chain fragment comprising amino acids 25-249 of SEQ ID NO: 69 and a light chain comprising SEQ ID NO: 287;
a heavy chain fragment comprising amino acids 25-244 of SEQ ID NO: 71 and a light chain comprising SEQ ID NO: 289;
a heavy chain fragment comprising amino acids 25-244 of SEQ ID NO: 73 and a light chain comprising SEQ ID NO: 291;
a heavy chain fragment comprising amino acids 25-249 of SEQ ID NO: 75 and a light chain comprising SEQ ID NO: 293;
a heavy chain fragment comprising amino acids 25-247 of SEQ ID NO: 77 and a light chain comprising SEQ ID NO: 295;
a heavy chain fragment comprising amino acids 25-247 of SEQ ID NO: 79 and a light chain comprising SEQ ID NO: 297;
a heavy chain fragment comprising amino acids 25-255 of SEQ ID NO: 81 and a light chain comprising SEQ ID NO: 299;
a heavy chain fragment comprising amino acids 25-246 of SEQ ID NO: 83 and a light chain comprising SEQ ID NO: 301;
a heavy chain fragment comprising amino acids 25-248 of SEQ ID NO: 85 and a light chain comprising SEQ ID NO: 303;
a heavy chain fragment comprising amino acids 25-252 of SEQ ID NO: 87 and a light chain comprising SEQ ID NO: 305;
a heavy chain fragment comprising amino acids 25-248 of SEQ ID NO: 89 and a light chain comprising SEQ ID NO: 307;
a heavy chain fragment comprising amino acids 25-244 of SEQ ID NO: 91 and a light chain comprising SEQ ID NO: 309;
a heavy chain fragment comprising amino acids 25-247 of SEQ ID NO: 93 and a light chain comprising SEQ ID NO: 311;
a heavy chain fragment comprising amino acids 25-254 of SEQ ID NO: 95 and a light chain comprising SEQ ID NO: 313;
a heavy chain fragment comprising amino acids 25-251 of SEQ ID NO: 97 and a light chain comprising SEQ ID NO: 315;
a heavy chain fragment comprising amino acids 25-245 of SEQ ID NO: 99 and a light chain comprising SEQ ID NO: 317;
a heavy chain fragment comprising amino acids 25-257 of SEQ ID NO: 101 and a light chain comprising SEQ ID NO: 319;
a heavy chain fragment comprising amino acids 25-256 of SEQ ID NO: 103 and a light chain comprising SEQ ID NO: 321;
a heavy chain fragment comprising amino acids 25-249 of SEQ ID NO: 105 and a light chain comprising SEQ ID NO: 323;
a heavy chain fragment comprising amino acids 25-248 of SEQ ID NO: 107 and a light chain comprising SEQ ID NO: 325;
a heavy chain fragment comprising amino acids 25-250 of SEQ ID NO: 109 and a light chain comprising SEQ ID NO: 327;
a heavy chain fragment comprising amino acids 25-244 of SEQ ID NO: 111 and a light chain comprising SEQ ID NO: 329;
a heavy chain fragment comprising amino acids 25-247 of SEQ ID NO: 113 and a light chain comprising SEQ ID NO: 331;
a heavy chain fragment comprising amino acids 25-248 of SEQ ID NO: 115 and a light chain comprising SEQ ID NO: 333;
a heavy chain fragment comprising amino acids 25-245 of SEQ ID NO: 117 and a light chain comprising SEQ ID NO: 335;
a heavy chain fragment comprising amino acids 25-253 of SEQ ID NO: 119 and a light chain comprising SEQ ID NO: 337;
a heavy chain fragment comprising amino acids 25-249 of SEQ ID NO: 121 and a light chain comprising SEQ ID NO: 339;
a heavy chain fragment comprising amino acids 25-253 of SEQ ID NO: 123 and a light chain comprising SEQ ID NO: 341
a heavy chain fragment comprising amino acids 25-253 of SEQ ID NO: 125 and a light chain comprising SEQ ID NO: 343;
a heavy chain fragment comprising amino acids 25-251 of SEQ ID NO: 127 and a light chain comprising SEQ ID NO: 345;
a heavy chain fragment comprising amino acids 25-245 of SEQ ID NO: 129 and a light chain comprising SEQ ID NO: 347;
a heavy chain fragment comprising amino acids 25-249 of SEQ ID NO: 131 and a light chain comprising SEQ ID NO: 349;
a heavy chain fragment comprising amino acids 25-250 of SEQ ID NO: 133 and a light chain comprising SEQ ID NO: 351;
a heavy chain fragment comprising amino acids 25-256 of SEQ ID NO: 135 and a light chain comprising SEQ ID NO: 353;
a heavy chain fragment comprising amino acids 25-250 of SEQ ID NO: 137 and a light chain comprising SEQ ID NO: 355;
a heavy chain fragment comprising amino acids 25-247 of SEQ ID NO: 139 and a light chain comprising SEQ ID NO: 357;
a heavy chain fragment comprising amino acids 25-253 of SEQ ID NO: 141 and a light chain comprising SEQ ID NO: 359;
a heavy chain fragment comprising amino acids 25-249 of SEQ ID NO: 143 and a light chain comprising SEQ ID NO: 361;
a heavy chain fragment comprising amino acids 25-246 of SEQ ID NO: 145 and a light chain comprising SEQ ID NO: 363;
a heavy chain fragment comprising amino acids 25-251 of SEQ ID NO: 147 and a light chain comprising SEQ ID NO: 365;
a heavy chain fragment comprising amino acids 25-245 of SEQ ID NO: 149 and a light chain comprising SEQ ID NO: 367;
a heavy chain fragment comprising amino acids 25-244 of SEQ ID NO: 151 and a light chain comprising SEQ ID NO: 369;
a heavy chain fragment comprising amino acids 25-249 of SEQ ID NO: 153 and a light chain comprising SEQ ID NO: 371;
a heavy chain fragment comprising amino acids 25-257 of SEQ ID NO: 155 and a light chain comprising SEQ ID NO: 373;
a heavy chain fragment comprising amino acids 25-250 of SEQ ID NO: 157 and a light chain comprising SEQ ID NO: 375;
a heavy chain fragment comprising amino acids 25-253 of SEQ ID NO: 159 and a light chain comprising SEQ ID NO: 377;
a heavy chain fragment comprising amino acids 25-245 of SEQ ID NO: 161 and a light chain comprising SEQ ID NO: 379;
a heavy chain fragment comprising amino acids 25-260 of SEQ ID NO: 163 and a light chain comprising SEQ ID NO: 381;
a heavy chain fragment comprising amino acids 25-245 of SEQ ID NO: 165 and a light chain comprising SEQ ID NO: 383;
a heavy chain fragment comprising amino acids 25-244 of SEQ ID NO: 167 and a light chain comprising SEQ ID NO: 385;
a heavy chain fragment comprising amino acids 25-244 of SEQ ID NO: 169 and a light chain comprising SEQ ID NO: 387;
a heavy chain fragment comprising amino acids 25-245 of SEQ ID NO: 171 and a light chain comprising SEQ ID NO: 389;
a heavy chain fragment comprising amino acids 25-244 of SEQ ID NO: 173 and a light chain comprising SEQ ID NO: 391;
a heavy chain fragment comprising amino acids 25-248 of SEQ ID NO: 175 and a light chain comprising SEQ ID NO: 393;
a heavy chain fragment comprising amino acids 25-246 of SEQ ID NO: 177 and a light chain comprising SEQ ID NO: 395;
a heavy chain fragment comprising amino acids 25-249 of SEQ ID NO: 179 and a light chain comprising SEQ ID NO: 397;
a heavy chain fragment comprising amino acids 25-249 of SEQ ID NO: 181 and a light chain comprising SEQ ID NO: 399;
a heavy chain fragment comprising amino acids 25-247 of SEQ ID NO: 183 and a light chain comprising SEQ ID NO: 401;
a heavy chain fragment comprising amino acids 25-251 of SEQ ID NO: 185 and a light chain comprising SEQ ID NO: 403;
a heavy chain fragment comprising amino acids 25-247 of SEQ ID NO: 187 and a light chain comprising SEQ ID NO: 405;
a heavy chain fragment comprising amino acids 25-249 of SEQ ID NO: 189 and a light chain comprising SEQ ID NO: 407;
a heavy chain fragment comprising amino acids 25-248 of SEQ ID NO: 191 and a light chain comprising SEQ ID NO: 409;
a heavy chain fragment comprising amino acids 25-246 of SEQ ID NO: 193 and a light chain comprising SEQ ID NO: 411;
a heavy chain fragment comprising amino acids 25-250 of SEQ ID NO: 195 and a light chain comprising SEQ ID NO: 413;
a heavy chain fragment comprising amino acids 25-245 of SEQ ID NO: 197 and a light chain comprising SEQ ID NO: 415;
a heavy chain fragment comprising amino acids 25-250 of SEQ ID NO: 199 and a light chain comprising SEQ ID NO: 417;
a heavy chain fragment comprising amino acids 25-246 of SEQ ID NO: 201 and a light chain comprising SEQ ID NO: 419;
a heavy chain fragment comprising amino acids 25-243 of SEQ ID NO: 203 and a light chain comprising SEQ ID NO: 421;
a heavy chain fragment comprising amino acids 25-248 of SEQ ID NO: 205 and a light chain comprising SEQ ID NO: 423;
a heavy chain fragment comprising amino acids 25-250 of SEQ ID NO: 207 and a light chain comprising SEQ ID NO: 425;
a heavy chain fragment comprising amino acids 25-249 of SEQ ID NO: 209 and a light chain comprising SEQ ID NO: 427;
a heavy chain fragment comprising amino acids 25-255 of SEQ ID NO: 211 and a light chain comprising SEQ ID NO: 429;
a heavy chain fragment comprising amino acids 25-245 of SEQ ID NO: 213 and a light chain comprising SEQ ID NO: 431;
a heavy chain fragment comprising amino acids 25-244 of SEQ ID NO: 215 and a light chain comprising SEQ ID NO: 433;
a heavy chain fragment comprising amino acids 25-250 of SEQ ID NO: 217 and a light chain comprising SEQ ID NO: 435;
a heavy chain fragment comprising amino acids 25-249 of SEQ ID NO: 219 and a light chain comprising SEQ ID NO: 437;
a heavy chain fragment comprising amino acids 25-247 of SEQ ID NO: 221 and a light chain comprising SEQ ID NO: 439;
a heavy chain fragment comprising amino acids 25-254 of SEQ ID NO: 223 and a light chain comprising SEQ ID NO: 441;
a heavy chain fragment comprising amino acids 25-248 of SEQ ID NO: 225 and a light chain comprising SEQ ID NO: 443;
a heavy chain fragment comprising amino acids 25-249 of SEQ ID NO: 227 and a light chain comprising SEQ ID NO: 445;
a heavy chain fragment comprising amino acids 25-253 of SEQ ID NO: 229 and a light chain comprising SEQ ID NO: 447;
a heavy chain fragment comprising amino acids 25-251 of SEQ ID NO: 231 and a light chain comprising SEQ ID NO: 449;
a heavy chain fragment comprising amino acids 25-244 of SEQ ID NO: 233 and a light chain comprising SEQ ID NO: 451;
a heavy chain fragment comprising amino acids 25-245 of SEQ ID NO: 235 and a light chain comprising SEQ ID NO: 453;
a heavy chain fragment comprising amino acids 25-244 of SEQ ID NO: 237 and a light chain comprising SEQ ID NO: 455; or
a heavy chain fragment comprising amino acids 25-254 of SEQ ID NO: 239 and a light chain comprising SEQ ID NO: 457.

[0015] In certain embodiments, the antibody or antigen-binding fragment comprises:

(i) a heavy chain amino acid sequence selected from the group consisting of:

### SEQ ID NO: 23, SEQ ID NO: 25, SEQ ID NO: 27, SEQ ID NO: 29, SEQ ID NO: 31,

### SEQ ID NO: 33, SEQ ID NO: 35, SEQ ID NO: 37, SEQ ID NO: 39, SEQ ID NO: 41,

### SEQ ID NO: 43, SEQ ID NO: 45, SEQ ID NO: 47, SEQ ID NO: 49, SEQ ID NO: 51,

### SEQ ID NO: 53, SEQ ID NO: 55, SEQ ID NO: 57, SEQ ID NO: 59, SEQ ID NO: 61,

### SEQ ID NO: 63, SEQ ID NO: 65, SEQ ID NO: 67, SEQ ID NO: 69, SEQ ID NO: 71,

### SEQ ID NO: 73, SEQ ID NO: 75, SEQ ID NO: 77, SEQ ID NO: 79, SEQ ID NO: 81,

### SEQ ID NO: 83, SEQ ID NO: 85, SEQ ID NO: 87, SEQ ID NO: 89, SEQ ID NO: 91,

### SEQ ID NO: 93, SEQ ID NO: 95, SEQ ID NO: 97, SEQ ID NO: 99, SEQ ID NO: 101,

### SEQ ID NO: 103, SEQ ID NO: 105, SEQ ID NO: 107, SEQ ID NO: 109, SEQ ID NO: 111,

### SEQ ID NO: 113, SEQ ID NO: 115, SEQ ID NO: 117, SEQ ID NO: 119, SEQ ID NO: 121,

### SEQ ID NO: 123, SEQ ID NO: 125, SEQ ID NO: 127, SEQ ID NO: 129, SEQ ID NO: 131,

### SEQ ID NO: 133, SEQ ID NO: 135, SEQ ID NO: 137, SEQ ID NO: 139, SEQ ID NO: 141,

### SEQ ID NO: 143, SEQ ID NO: 145, SEQ ID NO: 147, SEQ ID NO: 149, SEQ ID NO: 151,

### SEQ ID NO: 153, SEQ ID NO: 155, SEQ ID NO: 157, SEQ ID NO: 159, SEQ ID NO: 161,

### SEQ ID NO: 163, SEQ ID NO: 165, SEQ ID NO: 167, SEQ ID NO: 169, SEQ ID NO: 171,

### SEQ ID NO: 173, SEQ ID NO: 175, SEQ ID NO: 177, SEQ ID NO: 179, SEQ ID NO: 181,

### SEQ ID NO: 183, SEQ ID NO: 185, SEQ ID NO: 187, SEQ ID NO: 189, SEQ ID NO: 191,

### SEQ ID NO: 193, SEQ ID NO: 195, SEQ ID NO: 197, SEQ ID NO: 199, SEQ ID NO: 201,

### SEQ ID NO: 203, SEQ ID NO: 205, SEQ ID NO: 207, SEQ ID NO: 209, SEQ ID NO: 211,

### SEQ ID NO: 213, SEQ ID NO: 215, SEQ ID NO: 217, SEQ ID NO: 219, SEQ ID NO: 221,

### SEQ ID NO: 223, SEQ ID NO: 225, SEQ ID NO: 227, SEQ ID NO: 229, SEQ ID NO: 231,

### SEQ ID NO: 233, SEQ ID NO: 235, SEQ ID NO: 237 and SEQ ID NO: 239; and

[0016] (ii) a light chain amino acid sequence selected from the group consisting of:

### SEQ ID NO: 241, SEQ ID NO: 243, SEQ ID NO: 245, SEQ ID NO: 247, SEQ ID NO: 249,

### SEQ ID NO: 251, SEQ ID NO: 253, SEQ ID NO: 255, SEQ ID NO: 257, SEQ ID NO: 259,

### SEQ ID NO: 261, SEQ ID NO: 263, SEQ ID NO: 265, SEQ ID NO: 267, SEQ ID NO: 269,

### SEQ ID NO: 271, SEQ ID NO: 273, SEQ ID NO: 275, SEQ ID NO: 277, SEQ ID NO: 279,

### SEQ ID NO: 281, SEQ ID NO: 283, SEQ ID NO: 285, SEQ ID NO: 287, SEQ ID NO: 289,

### SEQ ID NO: 291, SEQ ID NO: 293, SEQ ID NO: 295, SEQ ID NO: 297, SEQ ID NO: 299,

### SEQ ID NO: 301, SEQ ID NO: 303, SEQ ID NO: 305, SEQ ID NO: 307, SEQ ID NO: 309,

### SEQ ID NO: 311, SEQ ID NO: 313, SEQ ID NO: 315, SEQ ID NO: 317, SEQ ID NO: 319,

### SEQ ID NO: 321, SEQ ID NO: 323, SEQ ID NO: 325, SEQ ID NO: 327, SEQ ID NO: 329,

### SEQ ID NO: 331, SEQ ID NO: 333, SEQ ID NO: 335, SEQ ID NO: 337, SEQ ID NO: 339,

### SEQ ID NO: 341, SEQ ID NO: 343, SEQ ID NO: 345, SEQ ID NO: 347, SEQ ID NO: 349,

### SEQ ID NO: 351, SEQ ID NO: 353, SEQ ID NO: 355, SEQ ID NO: 357, SEQ ID NO: 359,

### SEQ ID NO: 361, SEQ ID NO: 363, SEQ ID NO: 365, SEQ ID NO: 367, SEQ ID NO: 369,

### SEQ ID NO: 371, SEQ ID NO: 373, SEQ ID NO: 375, SEQ ID NO: 377, SEQ ID NO: 379,

### SEQ ID NO: 381, SEQ ID NO: 383, SEQ ID NO: 385, SEQ ID NO: 387, SEQ ID NO: 389,

### SEQ ID NO: 391, SEQ ID NO: 393, SEQ ID NO: 395, SEQ ID NO: 397, SEQ ID NO: 399,

### SEQ ID NO: 401, SEQ ID NO: 403, SEQ ID NO: 405, SEQ ID NO: 407, SEQ ID NO: 409,

### SEQ ID NO: 411, SEQ ID NO: 413, SEQ ID NO: 415, SEQ ID NO: 417, SEQ ID NO: 419,

### SEQ ID NO: 421, SEQ ID NO: 423, SEQ ID NO: 425, SEQ ID NO: 427, SEQ ID NO: 429,

### SEQ ID NO: 431, SEQ ID NO: 433, SEQ ID NO: 435, SEQ ID NO: 437, SEQ ID NO: 439,

### SEQ ID NO: 441, SEQ ID NO: 443, SEQ ID NO: 445, SEQ ID NO: 447, SEQ ID NO: 449,

### SEQ ID NO: 451, SEQ ID NO: 453, SEQ ID NO: 455 and SEQ ID NO: 457.

[0017] In certain aspects the disclosure relates to an isolated antibody or an antigen-binding fragment thereof that specifically binds ST2, comprising:

(i) a heavy chain variable domain comprising complementarity determining regions (CDRs) as set forth in a heavy chain variable domain amino acid sequence selected from the group consisting of:
amino acids 25-147 of SEQ ID NO: 23, amino acids 25-147 of SEQ ID NO: 25,
amino acids 25-145 of SEQ ID NO: 27, amino acids 25-148 of SEQ ID NO: 29,
amino acids 25-141 of SEQ ID NO: 31, amino acids 25-143 of SEQ ID NO: 33,
amino acids 25-150 of SEQ ID NO: 35, amino acids 25-148 of SEQ ID NO: 37,
amino acids 25-146 of SEQ ID NO: 39, amino acids 25-145 of SEQ ID NO: 41,
amino acids 25-143 of SEQ ID NO: 43, amino acids 25-151 of SEQ ID NO: 45,
amino acids 25-141 of SEQ ID NO: 47, amino acids 25-140 of SEQ ID NO: 49,
amino acids 25-145 of SEQ ID NO: 51, amino acids 25-152 of SEQ ID NO: 53,
amino acids 25-142 of SEQ ID NO: 55, amino acids 25-147 of SEQ ID NO: 57,
amino acids 25-141 of SEQ ID NO: 59, amino acids 25-148 of SEQ ID NO: 61,
amino acids 25-142 of SEQ ID NO: 63, amino acids 25-145 of SEQ ID NO: 65,
amino acids 25-140 of SEQ ID NO: 67, amino acids 25-145 of SEQ ID NO: 69,
amino acids 25-140 of SEQ ID NO: 71, amino acids 25-140 of SEQ ID NO: 73,
amino acids 25-145 of SEQ ID NO: 75, amino acids 25-143 of SEQ ID NO: 77,
amino acids 25-143 of SEQ ID NO: 79, amino acids 25-151 of SEQ ID NO: 81,
amino acids 25-142 of SEQ ID NO: 83, amino acids 25-144 of SEQ ID NO: 85,
amino acids 25-148 of SEQ ID NO: 87, amino acids 25-144 of SEQ ID NO: 89,
amino acids 25-140 of SEQ ID NO: 91, amino acids 25-143 of SEQ ID NO: 93,
amino acids 25-150 of SEQ ID NO: 95, amino acids 25-147 of SEQ ID NO: 97,
amino acids 25-141 of SEQ ID NO: 99, amino acids 25-153 of SEQ ID NO: 101,
amino acids 25-152 of SEQ ID NO: 103, amino acids 25-145 of SEQ ID NO: 105,
amino acids 25-144 of SEQ ID NO: 107, amino acids 25-146 of SEQ ID NO: 109,
amino acids 25-140 of SEQ ID NO: 111, amino acids 25-143 of SEQ ID NO: 113,
amino acids 25-144 of SEQ ID NO: 115, amino acids 25-141 of SEQ ID NO: 117,
amino acids 25-149 of SEQ ID NO: 119, amino acids 25-145 of SEQ ID NO: 121,
amino acids 25-149 of SEQ ID NO: 123, amino acids 25-149 of SEQ ID NO: 125,
amino acids 25-147 of SEQ ID NO: 127, amino acids 25-147 of SEQ ID NO: 129,
amino acids 25-145 of SEQ ID NO: 131, amino acids 25-146 of SEQ ID NO: 133,
amino acids 25-152 of SEQ ID NO: 135, amino acids 25-146 of SEQ ID NO: 137,
amino acids 25-149 of SEQ ID NO: 139, amino acids 25-149 of SEQ ID NO: 141,
amino acids 25-145 of SEQ ID NO: 143, amino acids 25-142 of SEQ ID NO: 145,
amino acids 25-147 of SEQ ID NO: 147, amino acids 25-141 of SEQ ID NO: 149,
amino acids 25-140 of SEQ ID NO: 151, amino acids 25-145 of SEQ ID NO: 153,
amino acids 25-153 of SEQ ID NO: 155, amino acids 25-146 of SEQ ID NO: 157,
amino acids 25-149 of SEQ ID NO: 159, amino acids 25-141 of SEQ ID NO: 161,
amino acids 25-156 of SEQ ID NO: 163, amino acids 25-141 of SEQ ID NO: 165,
amino acids 25-140 of SEQ ID NO: 167, amino acids 25-140 of SEQ ID NO: 169,
amino acids 25-141 of SEQ ID NO: 171, amino acids 25-140 of SEQ ID NO: 173,
amino acids 25-144 of SEQ ID NO: 175, amino acids 25-142 of SEQ ID NO: 177,
amino acids 25-145 of SEQ ID NO: 179, amino acids 25-145 of SEQ ID NO: 181,
amino acids 25-143 of SEQ ID NO: 183, amino acids 25-147 of SEQ ID NO: 185,
amino acids 25-143 of SEQ ID NO: 187, amino acids 25-145 of SEQ ID NO: 189,
amino acids 25-144 of SEQ ID NO: 191, amino acids 25-143 of SEQ ID NO: 193,
amino acids 25-146 of SEQ ID NO: 195, amino acids 25-141 of SEQ ID NO: 197,
amino acids 25-146 of SEQ ID NO: 199, amino acids 25-142 of SEQ ID NO: 201,
amino acids 25-139 of SEQ ID NO: 203, amino acids 25-144 of SEQ ID NO: 205,
amino acids 25-146 of SEQ ID NO: 207, amino acids 25-142 of SEQ ID NO: 209,
amino acids 25-151 of SEQ ID NO: 211, amino acids 25-141 of SEQ ID NO: 213,
amino acids 25-140 of SEQ ID NO: 215, amino acids 25-146 of SEQ ID NO: 217,
amino acids 25-142 of SEQ ID NO: 219, amino acids 25-143 of SEQ ID NO: 221,
amino acids 25-150 of SEQ ID NO: 223, amino acids 25-144 of SEQ ID NO: 225,
amino acids 25-145 of SEQ ID NO: 227, amino acids 25-149 of SEQ ID NO: 229,
amino acids 25-147 of SEQ ID NO: 231, amino acids 25-140 of SEQ ID NO: 233,
amino acids 25-141 of SEQ ID NO: 235, amino acids 25-140 of SEQ ID NO: 237, and
amino acids 25-150 of SEQ ID NO: 239; and
(ii) a light chain variable domain comprising CDRs as set forth in a light chain variable region amino acid sequence selected from the group consisting of:
amino acids 21-132 of SEQ ID NO: 241, amino acids 21-132 of SEQ ID NO: 243,
amino acids 21-128 of SEQ ID NO: 245, amino acids 21-127 of SEQ ID NO: 247,
amino acids 21-127 of SEQ ID NO: 249, amino acids 21-127 of SEQ ID NO: 251,
amino acids 21-131 of SEQ ID NO: 253, amino acids 21-132 of SEQ ID NO: 255,
amino acids 21-127 of SEQ ID NO: 257, amino acids 21-132 of SEQ ID NO: 259,
amino acids 21-127 of SEQ ID NO: 261, amino acids 21-127 of SEQ ID NO: 263,
amino acids 21-132 of SEQ ID NO: 265, amino acids 21-132 of SEQ ID NO: 267,
amino acids 21-127 of SEQ ID NO: 269, amino acids 21-127 of SEQ ID NO: 271,
amino acids 21-127 of SEQ ID NO: 273, amino acids 21-127 of SEQ ID NO: 275,
amino acids 21-127 of SEQ ID NO: 277, amino acids 21-127 of SEQ ID NO: 279,
amino acids 21-127 of SEQ ID NO: 281, amino acids 21-127 of SEQ ID NO: 283,
amino acids 21-127 of SEQ ID NO: 285, amino acids 21-132 of SEQ ID NO: 287,
amino acids 21-127 of SEQ ID NO: 289, amino acids 21-133 of SEQ ID NO: 291,
amino acids 21-127 of SEQ ID NO: 293, amino acids 21-132 of SEQ ID NO: 295,
amino acids 21-127 of SEQ ID NO: 297, amino acids 21-132 of SEQ ID NO: 299,
amino acids 21-127 of SEQ ID NO: 301, amino acids 21-127 of SEQ ID NO: 303,
amino acids 21-132 of SEQ ID NO: 305, amino acids 21-127 of SEQ ID NO: 307,
amino acids 21-127 of SEQ ID NO: 309, amino acids 21-127 of SEQ ID NO: 311,
amino acids 21-127 of SEQ ID NO: 313, amino acids 21-128 of SEQ ID NO: 315,
amino acids 21-132 of SEQ ID NO: 317, amino acids 21-127 of SEQ ID NO: 319,
amino acids 21-133 of SEQ ID NO: 321, amino acids 21-127 of SEQ ID NO: 323,
amino acids 21-127 of SEQ ID NO: 325, amino acids 21-127 of SEQ ID NO: 327,
amino acids 21-127 of SEQ ID NO: 329, amino acids 21-127 of SEQ ID NO: 331,
amino acids 21-127 of SEQ ID NO: 333, amino acids 21-127 of SEQ ID NO: 335,
amino acids 21-127 of SEQ ID NO: 337, amino acids 21-127 of SEQ ID NO: 339,
amino acids 21-128 of SEQ ID NO: 341, amino acids 21-131 of SEQ ID NO: 343,
amino acids 21-127 of SEQ ID NO: 345, amino acids 21-131 of SEQ ID NO: 347,
amino acids 21-132 of SEQ ID NO: 349, amino acids 21-127 of SEQ ID NO: 351,
amino acids 21-127 of SEQ ID NO: 353, amino acids 21-127 of SEQ ID NO: 355,
amino acids 21-127 of SEQ ID NO: 357, amino acids 21-127 of SEQ ID NO: 359,
amino acids 21-132 of SEQ ID NO: 361, amino acids 21-133 of SEQ ID NO: 363,
amino acids 21-132 of SEQ ID NO: 365, amino acids 21-126 of SEQ ID NO: 367,
amino acids 21-127 of SEQ ID NO: 369, amino acids 21-132 of SEQ ID NO: 371,
amino acids 21-127 of SEQ ID NO: 373, amino acids 21-132 of SEQ ID NO: 375,
amino acids 21-132 of SEQ ID NO: 377, amino acids 21-128 of SEQ ID NO: 379,
amino acids 21-127 of SEQ ID NO: 381, amino acids 21-127 of SEQ ID NO: 383,
amino acids 21-127 of SEQ ID NO: 385, amino acids 21-127 of SEQ ID NO: 387,
amino acids 21-127 of SEQ ID NO: 389, amino acids 21-127 of SEQ ID NO: 391,
amino acids 21-133 of SEQ ID NO: 393, amino acids 21-127 of SEQ ID NO: 395,
amino acids 21-127 of SEQ ID NO: 397, amino acids 21-132 of SEQ ID NO: 399,
amino acids 21-127 of SEQ ID NO: 401, amino acids 21-127 of SEQ ID NO: 403,
amino acids 21-127 of SEQ ID NO: 405, amino acids 21-132 of SEQ ID NO: 407,
amino acids 21-127 of SEQ ID NO: 409, amino acids 21-127 of SEQ ID NO: 411,
amino acids 21-127 of SEQ ID NO: 413, amino acids 21-127 of SEQ ID NO: 415,
amino acids 21-127 of SEQ ID NO: 417, amino acids 21-132 of SEQ ID NO: 419,
amino acids 21-127 of SEQ ID NO: 421, amino acids 21-133 of SEQ ID NO: 423,
amino acids 21-132 of SEQ ID NO: 425, amino acids 21-128 of SEQ ID NO: 427,
amino acids 21-132 of SEQ ID NO: 429, amino acids 21-132 of SEQ ID NO: 431,
amino acids 21-127 of SEQ ID NO: 433, amino acids 21-127 of SEQ ID NO: 435,
amino acids 21-127 of SEQ ID NO: 437, amino acids 21-127 of SEQ ID NO: 439,
amino acids 21-126 of SEQ ID NO: 441, amino acids 21-132 of SEQ ID NO: 443,
amino acids 21-127 of SEQ ID NO: 445, amino acids 21-127 of SEQ ID NO: 447,
amino acids 21-127 of SEQ ID NO: 449, amino acids 21-128 of SEQ ID NO: 451,
amino acids 21-127 of SEQ ID NO: 453, amino acids 21-127 of SEQ ID NO: 455 and
amino acids 21-133 of SEQ ID NO: 457.

[0018] In certain aspects the disclosure relates to a recombinant antibody or an antigen-binding fragment thereof that specifically binds ST2, wherein the antibody, or antigen-binding fragment thereof, comprises six complementarity determining regions (CDRs): CDRH1, CDRH2, CDRH3, CDRL1, CDRL2, and CDRL3,

wherein CDRH1 comprises an amino acid sequence that has at least 85%, 90%, 95%, 96%, 97%, 98%, or 99% sequence identity to a CDRH1 amino acid sequence selected from the group consisting of:

### SEQ ID NO: 458, SEQ ID NO: 464, SEQ ID NO: 470, SEQ ID NO: 476, SEQ ID NO: 482,

### SEQ ID NO: 488, SEQ ID NO: 494, SEQ ID NO: 500, SEQ ID NO: 506, SEQ ID NO: 512,

### SEQ ID NO: 518, SEQ ID NO: 524, SEQ ID NO: 530, SEQ ID NO: 536, SEQ ID NO: 542,

### SEQ ID NO: 548, SEQ ID NO: 554, SEQ ID NO: 560, SEQ ID NO: 566, SEQ ID NO: 572,

### SEQ ID NO: 578, SEQ ID NO: 584, SEQ ID NO: 590, SEQ ID NO: 596, SEQ ID NO: 602,

### SEQ ID NO: 608, SEQ ID NO: 614, SEQ ID NO: 620, SEQ ID NO: 626, SEQ ID NO: 632,

### SEQ ID NO: 638, SEQ ID NO: 644, SEQ ID NO: 650, SEQ ID NO: 656, SEQ ID NO: 662,

### SEQ ID NO: 668, SEQ ID NO: 674, SEQ ID NO: 680, SEQ ID NO: 686, SEQ ID NO: 692,

### SEQ ID NO: 698, SEQ ID NO: 704, SEQ ID NO: 710, SEQ ID NO: 716, SEQ ID NO: 722,

### SEQ ID NO: 728, SEQ ID NO: 734, SEQ ID NO: 740, SEQ ID NO: 746, SEQ ID NO: 752,

### SEQ ID NO: 758, SEQ ID NO: 764, SEQ ID NO: 770, SEQ ID NO: 776, SEQ ID NO: 782,

### SEQ ID NO: 788, SEQ ID NO: 794, SEQ ID NO: 800, SEQ ID NO: 806, SEQ ID NO: 812,

### SEQ ID NO: 818, SEQ ID NO: 824, SEQ ID NO: 830, SEQ ID NO: 836, SEQ ID NO: 842,

### SEQ ID NO: 848, SEQ ID NO: 854, SEQ ID NO: 860, SEQ ID NO: 866, SEQ ID NO: 872,

### SEQ ID NO: 878, SEQ ID NO: 884, SEQ ID NO: 890, SEQ ID NO: 896, SEQ ID NO: 902,

### SEQ ID NO: 908, SEQ ID NO: 914, SEQ ID NO: 920, SEQ ID NO: 926, SEQ ID NO: 932,

### SEQ ID NO: 938, SEQ ID NO: 944, SEQ ID NO: 950, SEQ ID NO: 956, SEQ ID NO: 962,

### SEQ ID NO: 968, SEQ ID NO: 974, SEQ ID NO: 980, SEQ ID NO: 986, SEQ ID NO: 992,

### SEQ ID NO: 998, SEQ ID NO: 1004, SEQ ID NO: 1010, SEQ ID NO: 1016, SEQ ID NO: 1022,

### SEQ ID NO: 1028, SEQ ID NO: 1034, SEQ ID NO: 1040, SEQ ID NO: 1046, SEQ ID NO: 1052,

### SEQ ID NO: 1058, SEQ ID NO: 1064, SEQ ID NO: 1070, SEQ ID NO: 1076, SEQ ID NO: 1082,

### SEQ ID NO: 1088, SEQ ID NO: 1094, SEQ ID NO: 1100 and SEQ ID NO: 1106;

[0019] wherein CDRH2 comprises an amino acid sequence that has at least 85%, 90%, 95%, 96%, 97%, 98%, or 99% sequence identity to a CDRH2 amino acid sequence selected from the group consisting of:

### SEQ ID NO: 459, SEQ ID NO: 465, SEQ ID NO: 471, SEQ ID NO: 477, SEQ ID NO: 483,

### SEQ ID NO: 489, SEQ ID NO: 495, SEQ ID NO: 501, SEQ ID NO: 507, SEQ ID NO: 513,

### SEQ ID NO: 519, SEQ ID NO: 525, SEQ ID NO: 531, SEQ ID NO: 537, SEQ ID NO: 543,

### SEQ ID NO: 549, SEQ ID NO: 555, SEQ ID NO: 561, SEQ ID NO: 567, SEQ ID NO: 573,

### SEQ ID NO: 579, SEQ ID NO: 585, SEQ ID NO: 591, SEQ ID NO: 597, SEQ ID NO: 603,

### SEQ ID NO: 609, SEQ ID NO: 615, SEQ ID NO: 621, SEQ ID NO: 627, SEQ ID NO: 633,

### SEQ ID NO: 639, SEQ ID NO: 645, SEQ ID NO: 651, SEQ ID NO: 657, SEQ ID NO: 663,

### SEQ ID NO: 669, SEQ ID NO: 675, SEQ ID NO: 681, SEQ ID NO: 687, SEQ ID NO: 693,

### SEQ ID NO: 699, SEQ ID NO: 705, SEQ ID NO: 711, SEQ ID NO: 717, SEQ ID NO: 723,

### SEQ ID NO: 729, SEQ ID NO: 735, SEQ ID NO: 741, SEQ ID NO: 747, SEQ ID NO: 753,

### SEQ ID NO: 759, SEQ ID NO: 765, SEQ ID NO: 771, SEQ ID NO: 777, SEQ ID NO: 783,

### SEQ ID NO: 789, SEQ ID NO: 795, SEQ ID NO: 801, SEQ ID NO: 807, SEQ ID NO: 813,

### SEQ ID NO: 819, SEQ ID NO: 825, SEQ ID NO: 831, SEQ ID NO: 837, SEQ ID NO: 843,

### SEQ ID NO: 849, SEQ ID NO: 855, SEQ ID NO: 861, SEQ ID NO: 867, SEQ ID NO: 873,

### SEQ ID NO: 879, SEQ ID NO: 885, SEQ ID NO: 891, SEQ ID NO: 897, SEQ ID NO: 903,

### SEQ ID NO: 909, SEQ ID NO: 915, SEQ ID NO: 921, SEQ ID NO: 927, SEQ ID NO: 933,

### SEQ ID NO: 939, SEQ ID NO: 945, SEQ ID NO: 951, SEQ ID NO: 957, SEQ ID NO: 963,

### SEQ ID NO: 969, SEQ ID NO: 975, SEQ ID NO: 981, SEQ ID NO: 987, SEQ ID NO: 993,

### SEQ ID NO: 999, SEQ ID NO: 1005, SEQ ID NO: 1011, SEQ ID NO: 1017, SEQ ID NO: 1023,

### SEQ ID NO: 1029, SEQ ID NO: 1035, SEQ ID NO: 1041, SEQ ID NO: 1047, SEQ ID NO: 1053,

### SEQ ID NO: 1059, SEQ ID NO: 1065, SEQ ID NO: 1071, SEQ ID NO: 1077, SEQ ID NO: 1083,

### SEQ ID NO: 1089, SEQ ID NO: 1095, SEQ ID NO: 1101 and SEQ ID NO: 1107,

[0020] wherein CDRH3 comprises an amino acid sequence that has at least 85%, 90%, 95%, 96%, 97%, 98% or 99% sequence identity to a CDRH3 amino acid sequence selected from the group consisting of:

### SEQ ID NO: 460, SEQ ID NO: 466, SEQ ID NO: 472, SEQ ID NO: 478, SEQ ID NO: 484,

### SEQ ID NO: 490, SEQ ID NO: 496, SEQ ID NO: 502, SEQ ID NO: 508, SEQ ID NO: 514,

### SEQ ID NO: 520, SEQ ID NO: 526, SEQ ID NO: 532, SEQ ID NO: 538, SEQ ID NO: 544,

### SEQ ID NO: 550, SEQ ID NO: 556, SEQ ID NO: 562, SEQ ID NO: 568, SEQ ID NO: 574,

### SEQ ID NO: 580, SEQ ID NO: 586, SEQ ID NO: 592, SEQ ID NO: 598, SEQ ID NO: 604,

### SEQ ID NO: 610, SEQ ID NO: 616, SEQ ID NO: 622, SEQ ID NO: 628, SEQ ID NO: 634,

### SEQ ID NO: 640, SEQ ID NO: 646, SEQ ID NO: 652, SEQ ID NO: 658, SEQ ID NO: 664,

### SEQ ID NO: 670, SEQ ID NO: 676, SEQ ID NO: 682, SEQ ID NO: 688, SEQ ID NO: 694,

### SEQ ID NO: 700, SEQ ID NO: 706, SEQ ID NO: 712, SEQ ID NO: 718, SEQ ID NO: 724,

### SEQ ID NO: 730, SEQ ID NO: 736, SEQ ID NO: 742, SEQ ID NO: 748, SEQ ID NO: 754,

### SEQ ID NO: 760, SEQ ID NO: 766, SEQ ID NO: 772, SEQ ID NO: 778, SEQ ID NO: 784,

### SEQ ID NO: 790, SEQ ID NO: 796, SEQ ID NO: 802, SEQ ID NO: 808, SEQ ID NO: 814,

### SEQ ID NO: 820, SEQ ID NO: 826, SEQ ID NO: 832, SEQ ID NO: 838, SEQ ID NO: 844,

### SEQ ID NO: 850, SEQ ID NO: 856, SEQ ID NO: 862, SEQ ID NO: 868, SEQ ID NO: 874,

### SEQ ID NO: 880, SEQ ID NO: 886, SEQ ID NO: 892, SEQ ID NO: 898, SEQ ID NO: 904,

### SEQ ID NO: 910, SEQ ID NO: 916, SEQ ID NO: 922, SEQ ID NO: 928, SEQ ID NO: 934,

### SEQ ID NO: 940, SEQ ID NO: 946, SEQ ID NO: 952, SEQ ID NO: 958, SEQ ID NO: 964,

### SEQ ID NO: 970, SEQ ID NO: 976, SEQ ID NO: 982, SEQ ID NO: 988, SEQ ID NO: 994,

### SEQ ID NO: 1000, SEQ ID NO: 1006, SEQ ID NO: 1012, SEQ ID NO: 1018, SEQ ID NO: 1024,

### SEQ ID NO: 1030, SEQ ID NO: 1036, SEQ ID NO: 1042, SEQ ID NO: 1048, SEQ ID NO: 1054,

### SEQ ID NO: 1060, SEQ ID NO: 1066, SEQ ID NO: 1072, SEQ ID NO: 1078, SEQ ID NO: 1084,

### SEQ ID NO: 1090, SEQ ID NO: 1096, SEQ ID NO: 1102 and SEQ ID NO: 1108,

[0021] wherein CDRL1 comprises an amino acid sequence that has at least 85%, 90%, 95%, 96%, 97%, 98%, or 99% sequence identity to a CDRL1 amino acid sequence selected from the group consisting of:

### SEQ ID NO: 461, SEQ ID NO: 467, SEQ ID NO: 473, SEQ ID NO: 479, SEQ ID NO: 485,

### SEQ ID NO: 491, SEQ ID NO: 497, SEQ ID NO: 503, SEQ ID NO: 509, SEQ ID NO: 515,

### SEQ ID NO: 521, SEQ ID NO: 527, SEQ ID NO: 533, SEQ ID NO: 539, SEQ ID NO: 545,

### SEQ ID NO: 551, SEQ ID NO: 557, SEQ ID NO: 563, SEQ ID NO: 569, SEQ ID NO: 575,

### SEQ ID NO: 581, SEQ ID NO: 587, SEQ ID NO: 593, SEQ ID NO: 599, SEQ ID NO: 605,

### SEQ ID NO: 611, SEQ ID NO: 617, SEQ ID NO: 623, SEQ ID NO: 629, SEQ ID NO: 635,

### SEQ ID NO: 641, SEQ ID NO: 647, SEQ ID NO: 653, SEQ ID NO: 659, SEQ ID NO: 665,

### SEQ ID NO: 671, SEQ ID NO: 677, SEQ ID NO: 683, SEQ ID NO: 689, SEQ ID NO: 695,

### SEQ ID NO: 701, SEQ ID NO: 707, SEQ ID NO: 713, SEQ ID NO: 719, SEQ ID NO: 725,

### SEQ ID NO: 731, SEQ ID NO: 737, SEQ ID NO: 743, SEQ ID NO: 749, SEQ ID NO: 755,

### SEQ ID NO: 761, SEQ ID NO: 767, SEQ ID NO: 773, SEQ ID NO: 779, SEQ ID NO: 785,

### SEQ ID NO: 791, SEQ ID NO: 797, SEQ ID NO: 803, SEQ ID NO: 809, SEQ ID NO: 815,

### SEQ ID NO: 821, SEQ ID NO: 827, SEQ ID NO: 833, SEQ ID NO: 839, SEQ ID NO: 845,

### SEQ ID NO: 851, SEQ ID NO: 857, SEQ ID NO: 863, SEQ ID NO: 869, SEQ ID NO: 875,

### SEQ ID NO: 881, SEQ ID NO: 887, SEQ ID NO: 893, SEQ ID NO: 899, SEQ ID NO: 905,

### SEQ ID NO: 911, SEQ ID NO: 917, SEQ ID NO: 923, SEQ ID NO: 929, SEQ ID NO: 935,

### SEQ ID NO: 941, SEQ ID NO: 947, SEQ ID NO: 953, SEQ ID NO: 959, SEQ ID NO: 965,

### SEQ ID NO: 971, SEQ ID NO: 977, SEQ ID NO: 983, SEQ ID NO: 989, SEQ ID NO: 995,

### SEQ ID NO: 1001, SEQ ID NO: 1007, SEQ ID NO: 1013, SEQ ID NO: 1019, SEQ ID NO: 1025,

### SEQ ID NO: 1031, SEQ ID NO: 1037, SEQ ID NO: 1043, SEQ ID NO: 1049, SEQ ID NO: 1055,

### SEQ ID NO: 1061, SEQ ID NO: 1067, SEQ ID NO: 1073, SEQ ID NO: 1079, SEQ ID NO: 1085,

### SEQ ID NO: 1091, SEQ ID NO: 1097, SEQ ID NO: 1103 and SEQ ID NO: 1109,

[0022] wherein CDRL2 comprises an amino acid sequence that that has at least 85%, 90%, 95%, 96%, 97%, 98%, or 99% sequence identity to a CDRL2 sequence selected from the group consisting of:

### SEQ ID NO: 462, SEQ ID NO: 468, SEQ ID NO: 474, SEQ ID NO: 480, SEQ ID NO: 486,

### SEQ ID NO: 492, SEQ ID NO: 498, SEQ ID NO: 504, SEQ ID NO: 510, SEQ ID NO: 516,

### SEQ ID NO: 522, SEQ ID NO: 528, SEQ ID NO: 534, SEQ ID NO: 540, SEQ ID NO: 546,

### SEQ ID NO: 552, SEQ ID NO: 558, SEQ ID NO: 564, SEQ ID NO: 570, SEQ ID NO: 576,

### SEQ ID NO: 582, SEQ ID NO: 588, SEQ ID NO: 594, SEQ ID NO: 600, SEQ ID NO: 606,

### SEQ ID NO: 612, SEQ ID NO: 618, SEQ ID NO: 624, SEQ ID NO: 630, SEQ ID NO: 636,

### SEQ ID NO: 642, SEQ ID NO: 648, SEQ ID NO: 654, SEQ ID NO: 660, SEQ ID NO: 666,

### SEQ ID NO: 672, SEQ ID NO: 678, SEQ ID NO: 684, SEQ ID NO: 690, SEQ ID NO: 696,

### SEQ ID NO: 702, SEQ ID NO: 708, SEQ ID NO: 714, SEQ ID NO: 720, SEQ ID NO: 726,

### SEQ ID NO: 732, SEQ ID NO: 738, SEQ ID NO: 744, SEQ ID NO: 750, SEQ ID NO: 756,

### SEQ ID NO: 762, SEQ ID NO: 768, SEQ ID NO: 774, SEQ ID NO: 780, SEQ ID NO: 786,

### SEQ ID NO: 792, SEQ ID NO: 798, SEQ ID NO: 804, SEQ ID NO: 810, SEQ ID NO: 816,

### SEQ ID NO: 822, SEQ ID NO: 828, SEQ ID NO: 834, SEQ ID NO: 840, SEQ ID NO: 846,

### SEQ ID NO: 852, SEQ ID NO: 858, SEQ ID NO: 864, SEQ ID NO: 870, SEQ ID NO: 876,

### SEQ ID NO: 882, SEQ ID NO: 888, SEQ ID NO: 894, SEQ ID NO: 900, SEQ ID NO: 906,

### SEQ ID NO: 912, SEQ ID NO: 918, SEQ ID NO: 924, SEQ ID NO: 930, SEQ ID NO: 936,

### SEQ ID NO: 942, SEQ ID NO: 948, SEQ ID NO: 954, SEQ ID NO: 960, SEQ ID NO: 966,

### SEQ ID NO: 972, SEQ ID NO: 978, SEQ ID NO: 984, SEQ ID NO: 990, SEQ ID NO: 996,

### SEQ ID NO: 1002, SEQ ID NO: 1008, SEQ ID NO: 1014, SEQ ID NO: 1020, SEQ ID NO: 1026,

### SEQ ID NO: 1032, SEQ ID NO: 1038, SEQ ID NO: 1044, SEQ ID NO: 1050, SEQ ID NO: 1056,

### SEQ ID NO: 1062, SEQ ID NO: 1068, SEQ ID NO: 1074, SEQ ID NO: 1080, SEQ ID NO: 1086,

### SEQ ID NO: 1092, SEQ ID NO: 1098, SEQ ID NO: 1104 and SEQ ID NO: 1110,

[0023] wherein CDRL3 comprises an amino acid sequence that has at least 85%, 90%, 95%, 96%, 97%, 98%, or 99% sequence identity to a CDRL3 sequence selected from the group consisting of:

### SEQ ID NO: 463, SEQ ID NO: 469, SEQ ID NO: 475, SEQ ID NO: 481, SEQ ID NO: 487,

### SEQ ID NO: 493, SEQ ID NO: 499, SEQ ID NO: 505, SEQ ID NO: 511, SEQ ID NO: 517,

### SEQ ID NO: 523, SEQ ID NO: 529, SEQ ID NO: 535, SEQ ID NO: 541, SEQ ID NO: 547,

### SEQ ID NO: 553, SEQ ID NO: 559, SEQ ID NO: 565, SEQ ID NO: 571, SEQ ID NO: 577,

### SEQ ID NO: 583, SEQ ID NO: 589, SEQ ID NO: 595, SEQ ID NO: 601, SEQ ID NO: 607,

### SEQ ID NO: 613, SEQ ID NO: 619, SEQ ID NO: 625, SEQ ID NO: 631, SEQ ID NO: 637,

### SEQ ID NO: 643, SEQ ID NO: 649, SEQ ID NO: 655, SEQ ID NO: 661, SEQ ID NO: 667,

### SEQ ID NO: 673, SEQ ID NO: 679, SEQ ID NO: 685, SEQ ID NO: 691, SEQ ID NO: 697,

### SEQ ID NO: 703, SEQ ID NO: 709, SEQ ID NO: 715, SEQ ID NO: 721, SEQ ID NO: 727,

### SEQ ID NO: 733, SEQ ID NO: 739, SEQ ID NO: 745, SEQ ID NO: 751, SEQ ID NO: 757,

### SEQ ID NO: 763, SEQ ID NO: 769, SEQ ID NO: 775, SEQ ID NO: 781, SEQ ID NO: 787,

### SEQ ID NO: 793, SEQ ID NO: 799, SEQ ID NO: 805, SEQ ID NO: 811, SEQ ID NO: 817,

### SEQ ID NO: 823, SEQ ID NO: 829, SEQ ID NO: 835, SEQ ID NO: 841, SEQ ID NO: 847,

### SEQ ID NO: 853, SEQ ID NO: 859, SEQ ID NO: 865, SEQ ID NO: 871, SEQ ID NO: 877,

### SEQ ID NO: 883, SEQ ID NO: 889, SEQ ID NO: 895, SEQ ID NO: 901, SEQ ID NO: 907,

### SEQ ID NO: 913, SEQ ID NO: 919, SEQ ID NO: 925, SEQ ID NO: 931, SEQ ID NO: 937,

### SEQ ID NO: 943, SEQ ID NO: 949, SEQ ID NO: 955, SEQ ID NO: 961, SEQ ID NO: 967,

### SEQ ID NO: 973, SEQ ID NO: 979, SEQ ID NO: 985, SEQ ID NO: 991, SEQ ID NO: 997,

### SEQ ID NO: 1003, SEQ ID NO: 1009, SEQ ID NO: 1015, SEQ ID NO: 1021, SEQ ID NO: 1027,

### SEQ ID NO: 1033, SEQ ID NO: 1039, SEQ ID NO: 1045, SEQ ID NO: 1051, SEQ ID NO: 1057,

### SEQ ID NO: 1063, SEQ ID NO: 1069, SEQ ID NO: 1075, SEQ ID NO: 1081, SEQ ID NO: 1087,

### SEQ ID NO: 1093, SEQ ID NO: 1099, SEQ ID NO: 1105 and SEQ ID NO: 1111.

[0024] In certain embodiments, the recombinant antibody, or the antigen-binding fragment thereof is a fully human antibody. In certain embodiments, the antigen-binding fragment is selected from the group consisting of a Fab fragment, a F(ab′)2 fragment, a Fd fragment, a Fv fragment, a dAb fragment, a single chain Fv (scFv), a dimerized variable region (V region) fragment (diabody), and a disulfide-stabilized V region fragment (dsFv).

[0025] In certain aspects the disclosure relates to a fusion protein comprising: a) a human IL-2 protein domain; b) an immunoglobulin Fc protein domain; and c) an ST2-binding domain comprising an antibody specific for ST2, or an antigen-binding fragment thereof as disclosed herein. In certain embodiments of the fusion proteins disclosed herein, the fusion protein further comprises at least one peptide linker domain. In certain embodiments of the fusion proteins disclosed herein, the human IL-2 protein domain comprises human IL-2 with a substitution selected from the group consisting of: T3A, N88R, N88G, D20H, C125S, Q126L, and Q126F, relative to the amino acid sequence of SEQ ID NO: 2. In certain embodiments of the fusion proteins disclosed herein, the immunoglobulin Fc protein domain comprises an amino acid sequence selected from the group consisting of the human IgG1 Fc variant of SEQ ID NO: 4, SEQ ID NO: 5, SEQ ID NO: 7, SEQ ID NO: 8 or SEQ ID NO: 9. In certain embodiments of the fusion proteins disclosed herein, the peptide linker domain comprises the amino acid sequence of SEQ ID NO: 6. In certain embodiments of the fusion proteins disclosed herein, the fusion protein comprises a first peptide linker domain and a second peptide linker domain.

[0026] In certain embodiments of the fusion proteins disclosed herein, each domain has an amino-terminus (N-terminus) and a carboxy terminus (C-terminus); and wherein the fusion protein is configured so that

a) the C-terminus of the human IL-2 protein domain is fused through a peptide bond to the N-terminus of the first peptide linker domain;
b) the N-terminus of the IgG Fc protein domain is fused through a peptide bond to the C-terminus of the first peptide linker domain;
c) the N-terminus of the second peptide linker domain is fused through a peptide bond to the C-terminus of the IgG Fc protein domain; and
d) the N-terminus of the ST2-binding domain is fused through a peptide bond to the C-terminus of the second peptide linker domain.

[0027] In certain aspects the disclosure relates to a nucleic acid encoding a fusion protein as disclosed herein. In certain aspects the disclosure relates to a dimeric protein comprising a fusion protein as disclosed herein.

[0028] In certain aspects the disclosure relates to a dimeric protein comprising a first fusion protein and a second fusion protein, wherein:
[0029] a. each fusion protein comprises an immunoglobulin (IgG) Fc protein domain and at least one additional protein domain selected from the group consisting of
   [0030] i. a human IL-2 protein domain; and
   [0031] ii. an ST2-binding domain comprising an antibody or antigen-binding fragment as disclosed herein; and
[0032] b. the dimeric protein comprises at least one of the human IL-2 protein domain and at least one of the ST2-binding domain.

[0033] In certain embodiments of the dimeric proteins disclosed herein,
[0034] a. the first fusion protein comprises the human IL-2 protein domain, a first immunoglobulin Fc protein domain, and a first peptide linker; and
[0035] b. the second fusion protein comprises the ST2-binding domain, a second immunoglobulin Fc protein domain, and a second peptide linker domain.

[0036] In certain embodiments of the dimeric proteins disclosed herein,
[0037] a. each domain has an amino-terminus (N-terminus) and a carboxy terminus (C-terminus);
[0038] b. the first fusion protein is configured so that
   [0039] i. the C-terminus of the human IL-2 protein domain is fused through a peptide bond to the N-terminus of the first peptide linker domain; and
   [0040] ii. the N-terminus of the first IgG Fc protein domain is fused through a peptide bond to the C-terminus of the first peptide linker domain; and
[0041] c. the second fusion protein is configured so that
   [0042] i. the C-terminus of the second IgG Fc protein domain is fused through a peptide bond to the N-terminus of the second peptide linker domain; and
   [0043] ii. the N-terminus of the ST2-binding domain is fused through a peptide bond to the C-terminus of the second peptide linker domain.

[0044] In certain embodiments of the dimeric proteins disclosed herein, at least one of the fusion proteins further comprises at least one peptide linker domain. In certain embodiments of the dimeric proteins disclosed herein, the peptide linker domain comprises the amino acid sequence of SEQ ID NO: 6.

[0045] In certain embodiments, the human IL-2 protein domain comprises human IL-2 with a substitution selected from the group consisting of: T3A, N88R, N88G, D20H, C125S, Q126L, and Q126F, relative to the amino acid sequence of SEQ ID NO: 2. In certain embodiments of the dimeric proteins disclosed herein, the immunoglobulin Fc protein domain comprises an amino acid sequence selected from the group consisting of the human IgG1 Fc variant of SEQ ID NO: 4, SEQ ID NO: 5, SEQ ID NO: 7, SEQ ID NO: 8 or SEQ ID NO: 9.

[0046] In certain aspects the disclosure relates to a pharmaceutical composition comprising a dimeric protein as disclosed herein.

[0047] In certain aspects the disclosure relates to a method for treating a condition, the method comprising administering to a subject in need thereof a therapeutically-effective amount of a pharmaceutical composition as disclosed herein. In certain embodiments, the condition is selected from the group consisting of an inflammatory myopathy, muscular dystrophy, polymyositis, dermatomyositis, an inflammatory condition of adipose tissue, an inflammatory condition of the colon, an inflammatory condition of the lung, Graft-vs-Host Disease, Pemphigus Vulgaris, Systemic Lupus Erythematosus, Scleroderma, Ulcerative Colitis, Crohn's Disease, Psoriasis, Type 1 Diabetes, Multiple Sclerosis, Amyotrophic Lateral Sclerosis, Alopecia Areata, Uveitis, Neuromyelitis Optica, and Duchenne Muscular Dystrophy. In certain embodiments, the administration is subcutaneous.

[0048] In certain aspects the disclosure relates to a method of selectively activating an ST2⁺ regulatory T cell relative to an ST2⁻ regulatory T cell in a subject, the method comprising administering to the subject a therapeutically effective amount of a pharmaceutical composition as disclosed herein.

### INCORPORATION BY REFERENCE

[0049] All publications, patents, and patent applications mentioned in this specification are herein incorporated by reference to the same extent as if each individual publication, patent, or patent application was specifically and individually indicated to be incorporated by reference.

### BRIEF DESCRIPTION OF THE DRAWINGS

[0050] FIG. 1 shows a diagram illustrating the overlap of cells expressing IL-2Rαβγ and ST2.

[0051] FIG. 2A shows a schematic diagram of a compound having an IL2R-binding moiety, an ST2-binding moiety, and a linker between them.

[0052] FIG. 2B shows a schematic diagram of an exemplary compound having an IL2R-binding moiety covalently linked to a multimerization moiety, an ST2-binding moiety covalently linked to a multimerization moiety, and covalent bonds between the multimerization moieties.

[0053] FIG. 2C shows a schematic diagram of an exemplary compound having an IL2R-binding moiety covalently linked to a multimerization moiety, an ST2-binding moiety covalently linked to a linker covalently linked to a multimerization moiety, and covalent bonds between the multimerization moieties.

[0054] FIG. 2D shows a schematic diagram of an exemplary compound having an IL2R-binding moiety covalently linked to a linker covalently linked to a multimerization moiety, an ST2-binding moiety covalently linked to a multimerization moiety, and covalent bonds between the multimerization moieties.

[0055] FIG. 2E shows a schematic diagram of an exemplary compound having an IL2R-binding moiety covalently linked to a linker covalently linked to a multimerization moiety, an ST2-binding moiety covalently linked to a linker covalently linked to a multimerization moiety, and covalent bonds between the multimerization moieties.

[0056] FIG. 2F shows a schematic diagram of an exemplary compound having a) an IL2R-binding moiety covalently linked to a multimerization moiety covalently linked to an ST2-binding moiety, b) an ST2-binding moiety covalently linked to a multimerization moiety covalently linked to an IL2R-binding moiety, and c) covalent bonds between the multimerization moieties.

[0057] FIG. 3A-3E show schematic diagrams of dimeric proteins comprising IgG1 Fc regions. The dimeric proteins comprise an IL-2 variant (N88R, C125S) and an antigen-binding fragment (Fab) that binds to ST2 (Ab2 or Ab4). Each diagram represents two different dimeric proteins, one containing Ab2 as the Fab region, and the other containing Ab4 as the Fab region. In the protein names, “N” indicates N-terminal, “C” indicates C-terminal, “v” indicates variant, “B” indicates bivalent, and “M” indicates monovalent.

[0058] FIG. 4A shows Biacore sensorgrams showing binding between human ST2 and Ab2/IL-2v bispecific molecules.

[0059] FIG. 4B shows Biacore sensorgrams showing binding between human ST2 and Ab4/IL-2v bispecific molecules.

[0060] FIG. 5A shows Biacore sensorgrams showing binding between human IL2R alpha and Ab2/IL-2v bispecific molecules.

[0061] FIG. 5B shows Biacore sensorgrams showing binding between human IL2R alpha and Ab4/IL-2v bispecific molecules.

### DETAILED DESCRIPTION OF THE INVENTION

[0062] Regulatory T cells (Tregs) are a class of CD4+CD25+ T cells that suppress the activity of other immune cells, such as CD4+ conventional T cells (Tconv) and CD8+ cells. Tregs are central to immune system homeostasis, maintain tolerance to self-antigens, and modulate the immune response to foreign antigens. Tregs can be robustly activated by Interleukin 2 (IL-2), but IL-2 also activates many other cell types, which can result in significant toxicity. It has become clear that there are subsets of Tregs that can be defined by expression of specific molecular markers and by their roles in different immunological responses. One Treg subset is the ST2+ Treg subset. The defining cell surface marker for ST2+ Tregs is ST2, a component of a cytokine receptor also known interleukin 1 receptor-like 1 protein (IL1RL1), and which is a subunit of the IL-33 receptor. IL-33 is categorized as an “alarmin”, an inflammatory cytokine associated with acute inflammatory responses. ST2+ Tregs are found in tissues such as muscle, visceral adipose, colon, and lung, and possess immunoregulatory and tissue repair functions.

[0063] Skeletal muscle is normally devoid of T cells, but following acute muscle injury, large numbers of ST2+ Tregs rapidly migrate into muscle tissue in large numbers. The recruitment of these Tregs into muscle tissue, and production of the growth factor amphiregulin (AREG) has been associated with activation of muscle satellite cells and with tissue repair. Treg deficiency impairs muscle repair after injury, and expansion of Tregs in muscle using IL-2-IL-2R complexes leads to improved outcomes in an animal model of dystrophin-deficient muscular dystrophy. A significant fraction of Tregs that produce AREG are ST2+. ST2+ Tregs also have also been associated with inflamed lung tissue following influenza virus infection, and are associated with lung tissue repair following infection. Treatment of ST2+ Treg with the ligand for the ST2 receptor, IL-33, increases AREG production and tissue repair. Therefore, enhancing the number of ST2+ Tregs or the activity of ST2+ Tregs can treat, or prevent, autoimmune and inflammatory diseases such as inflammatory myopathies, inflammatory muscle diseases, and improve tissue healing after injury or stress.

[0064] For example, the role of ST2+ Tregs has been established in animal models of muscle inflammation. One of those animal models is acute muscle injury (Burzyn et al., 2013, Cell 155(6): 1282-1295) in wild type mice, and a second model is the mdx mouse muscular dystrophy model, a model of chronic muscle inflammation caused by genetic deficiency in dystrophin (mdx mice; Villalta et al., 2014, Sci Transl Med 5(258): 258ra142). A role for ST2+ Treg has also been established in a mouse model of inflammatory bowel disease (Schiering et al., 2014, Nature 513(7519):564-568).

[0065] By providing compounds and methods that are able to selectively expand ST2+ Tregs numbers and/or enhance ST2+ Treg activity, the present disclosure makes possible new treatments of inflammatory and degenerative diseases. For example, the present disclosure provides a compound with a first moiety that binds to the IL-2 receptor (IL-2R or IL2R) and a second moiety that binds to ST2. IL-2R is a heterotrimeric protein expressed on a variety of different immune cell types, including T cells, NK cells, eosinophils, and monocytes. This broad expression pattern provides a pleiotropic effect on the immune system and a high systemic toxicity of IL-2 treatments, and can make targeting IL-2R+ cells challenging.

[0066] IL2-R has three forms, generated by different combinations of three different IL-2R proteins: α (alpha), β (beta), and γ (gamma). These receptor chains assemble to generate the three different receptor forms: (1) the low affinity receptor, IL2Rα, which does not signal; (2) the intermediate affinity receptor (IL2Rβγ), composed of IL2Rβ and IL2Rγ, which is broadly expressed on CD4+ conventional T cells (Tconv), NK cells, eosinophils, and monocytes; and (3) the high affinity receptor (IL2Rαβγ), composed of IL2Rα, IL2Rβ, and IL2Rγ, which is expressed transiently on activated T cells and constitutively on Treg cells. Conventional T cells (Tconv) are those which are activated by antigens and participate in the immune attack. Conventional T cells include helper T cells, cytotoxic T cells, and memory T cells. Mutations in IL-2 can change the binding affinity of IL-2 to different IL-2R receptor forms. Thus, the present disclosure provides compounds that selectively activate and expand Tregs, for example ST2+ Tregs, by comprising a moiety that selectively binds to the high affinity receptor (IL2Rαβγ). An exemplary moiety includes, but is not limited to, an IL-2 variant comprising one or more mutations that modifies the binding relative to wild-type IL-2 so that the IL-2 variant selectively binds to the high affinity receptor (IL2Rαβγ) relative to the intermediate affinity receptor and the low affinity receptor.

[0067] Methods and compositions of the present disclosure relate to a compound comprising a first moiety that binds to the IL-2 receptor and a second moiety that binds to ST2, enabling the compound to be much more selective and potent in its ability to activate and expand ST2+ Tregs. In some embodiments, these compounds target cells that express both the IL-2 receptor or a specific isoform thereof, and ST2. For example, a compound that specifically binds to the IL2Rαβγ isoform can bind to Treg cells expressing ST2. FIG. 1 shows expression domains of IL-2Rαβγ and ST2 in a mixed population of Tregs and an example of an area of overlap where a compound of this disclosure can bind. In some embodiments, the first and second moieties are covalently linked, for example, by an immunoglobulin Fc domain. In some embodiments, the compound also comprises a linker joining the IL-2 receptor-binding moiety and the immunoglobulin Fc domain and/or a linker joining the ST2-binding moiety and the immunoglobulin Fc domain. In some embodiments, the compound can regulate the activities of white blood cells, for example, leukocytes or lymphocytes, that are responsible for immunity. The immunoglobulin Fc domain can increase the in vivo stability of the molecule, and the linker covalently joins a moiety and an Fc domain. By providing moieties that bind to the IL2 receptor and to ST2, the compounds described herein can target cells (for example, T regulatory cells) that express both the IL2 receptor and ST2. In some embodiments, an Fc domain is deficient in its effector functions. An exemplary compound comprises a first moiety that binds to the IL-2 receptor and a second moiety that binds to ST2, wherein the first moiety that binds to the IL-2 receptor is covalently linked to a first effector-deficient Fc domain via a linker and the second moiety that binds to ST2 is covalently linked to a second effector-deficient Fc domain via a linker, and wherein the first effector-deficient Fc domain and the second effector-deficient Fc domain are covalently linked via a disulfide bond. Exemplary compounds are shown in FIGS. 2A-2E, which depict compounds comprising ST2-binding and IL2R-binding moieties, in various combinations with linkers and multimerization domains (which can be, for example, Fc domains). Another example of such a compound is shown in FIG. 2F, wherein an IL2 moiety and an ST2-binding moiety are at the N-terminus and the C-terminus, respectively, of an IgG Fc protein. Such a protein may be in reversed orientation, wherein the ST2-binding moiety is at the N-terminus and the IL2 moiety is at the C-terminus, and may incorporate peptide linkers between one or both of the ST-2 binding moieties and their respective Fc domains, or between one or both of the IL2R binding moieties and their respective Fc domains. An exemplary method for treating a condition, for example, an inflammatory condition such as an inflammatory myopathy, comprises administering to a subject in need thereof a therapeutically-effective amount of a compound as described herein. Exemplary conditions include, but are not limited to, muscular dystrophy and dermatomyositis.

Moieties that Bind the IL-2 Receptor

[0068] As described above, the present disclosure provides a compound comprising a first moiety that binds an IL-2 receptor and a second moiety that binds ST2. A moiety that binds an IL-2 receptor can be a polypeptide comprising the full length of wild-type IL-2, shorter, or longer. The IL-2 receptor-binding moiety can have a wild-type IL-2 sequence, as shown in SEQ ID NO: 2: (APTSSSTKKTQLQLEHLLLDLQMILNGINNYKNPKLTRMLTFKFYMPKKATELKHLQCLEE ELKPLEEVLNLAQSKNFHLRPRDLISNINVIVLELKGSETTFMCEYADETATIVEFLNRWITFX QSIISTLT) or a variant of IL-2. IL-2 variants can contain one or more substitutions, deletions, or insertions that deviate from the wild-type IL-2 amino acid sequence. Residues are designated herein by the one letter amino acid code followed by the IL-2 amino acid position, e.g., K35 is the lysine residue at position 35 of the wild-type IL-2 sequence. Substitutions are designated herein by the one letter amino acid code followed by the IL-2 amino acid position followed by the substituting one letter amino acid code, e.g., K35A is a substitution of the lysine residue at position 35 of SEQ ID NO: 2 with an alanine residue.

[0069] Compounds herein can exhibit specificity for different IL-2 receptor classes that is similar or dissimilar to the specificity of wild-type IL-2. Compounds herein can exhibit increased stability or biological effect in comparison to wild-type IL-2. For example, a mutation can provide a compound with increased specificity for certain IL-2 receptors in comparison to wild-type IL-2. In some embodiments, a compound selectively binds to the IL2Rαβγ receptor relative to the IL2Rβγ receptor, for example, through its IL-2 binding moiety. In some embodiments, this selective binding is due to one or more mutations in an IL-2 sequence as compared to a wild-type IL-2 sequence. For example, IL-2 N88R is selective for binding to the IL2Rαβγ receptor over the IL2Rβγ receptor. IL-2 can stimulate the proliferation of IL2Rαβγ-expressing PHA-activated T cells as effectively as wildtype IL-2, while exhibiting a 3,000-fold reduced stimulation of the proliferation of IL2Rβγ-expressing NK cells. Other mutations that exhibit increased selectivity for IL2Rαβγ include the substitutions D20H, N88I, N88G, Q126L, and Q126F.

[0070] In some embodiments, an IL-2 receptor-binding moiety comprises a mutation that enhances the stability of a compound of the present disclosure. For example, an IL-2 C125S mutation promotes stability by eliminating an unpaired cysteine residue, thereby preventing misfolding of the IL-2 polypeptide. Misfolding can lead to protein aggregation and increase clearance of the polypeptide in vivo. In some embodiments, an IL-2 polypeptide comprises a mutation that creates or removes a glycosylation site. For example the IL-2 mutation T3A removes an O-linked glycosylation site. In some embodiments, an IL-2 variant with the T3A mutation also comprises an N88R mutation and/or a C125S mutation. In some embodiments, an IL-2 variant comprises T3A, N88R, and C125S mutations, as in SEQ ID NO: 3.

[0071] In some embodiments, substitutions occur at one or more of positions 3, 20, 88, 125, and 126. In some embodiments, substitutions occur at one, two, three, four, or five of the positions. In some embodiments, an IL-2 variant comprises mutations at positions 88 and 125, for example, N88R and C125S. In some embodiments, an IL-2 receptor-binding moiety comprises the amino acid sequence set forth in SEQ ID NO: 1: APTSSSTKKTQLQLEHLLLDLQMILNGINNYKNPKLTRMLTFKFYMPKKATELKHLQCLEEE LKPLEEVLNLAQSKNFHLRPRDLISRINVIVLELKGSETTFMCEYADETATIVEFLNRWITFSQ SIISTLT. In some embodiments, an IL-2 variant comprises mutations at positions 3, 88 and 125, for example, T3A, N88R and C125S, as in SEQ ID NO: 3: APASSSTKKTQLQLEHLLLDLQMILNGINNYKNPKLTRMLTFKFYMPKKATELKHLQCLEE ELKPLEEVLNLAQSKNFHLRPRDLISRINVIVLELKGSETTFMCEYADETATIVEFLNRWITFS QSIISTLT. In some embodiments, an IL-2 variant comprises 1, 2, 3, 4, 5, 6, 7, 8, 9, 10, 11, 12, 13, 14, 15, 16, 17, 18, 19, or 20 mutations (e.g., substitutions) in comparison to a wild-type IL-2 sequence.

[0072] Compounds herein include IL-2 variants comprising an amino acid sequence that is at least 60%, at least 61%, at least 62%, at least 63%, at least 64%, at least 65%, at least 66%, at least 67%, at least 68%, at least 69%, at least 70%, at least 71%, at least 72%, at least 73%, at least 74%, at least 75%, at least 76%, at least 77%, at least 78%, at least 79%, at least 80%, at least 81%, at least 82%, at least 83%, at least 84%, at least 85%, at least 86%, at least 87%, at least 88%, at least 89%, at least 90%, at least 91%, at least 92%, at least 93%, at least 94%, at least 95%, at least 96%, at least 97%, at least 98%, or at least 99% identical to the wild-type IL-2 amino acid sequence (SEQ ID NO: 2). Compounds herein include IL-2 variants comprising an amino acid sequence that is 60%-99% identical to the wild-type IL-2 amino acid sequence, for example, an amino acid sequence that is 80%-99% identical to the wild-type IL-2 amino acid sequence, an amino acid sequence that is 85%-99% identical to the wild-type IL-2 amino acid sequence, an amino acid sequence that is 90%-99% identical to the wild-type IL-2 amino acid sequence, or an amino acid sequence that is 95%-99% identical to the wild-type IL-2 amino acid sequence (SEQ ID NO: 2). Compounds herein include IL-2 variants that comprise an amino acid sequence having an N88R mutation that is at least 60%, at least 61%, at least 62%, at least 63%, at least 64%, at least 65%, at least 66%, at least 67%, at least 68%, at least 69%, at least 70%, at least 71%, at least 72%, at least 73%, at least 74%, at least 75%, at least 76%, at least 77%, at least 78%, at least 79%, at least 80%, at least 81%, at least 82%, at least 83%, at least 84%, at least 85%, at least 86%, at least 87%, at least 88%, at least 89%, at least 90%, at least 91%, at least 92%, at least 93%, at least 94%, at least 95%, at least 96%, at least 97%, at least 98%, or at least 99% identical to the wild-type IL-2 amino acid sequence (SEQ ID NO: 2). Compounds herein include IL-2 variants comprising an amino acid sequence having an N88R mutation that is 60%-99% identical to the wild-type IL-2 amino acid sequence, for example, an amino acid sequence that is 80%-99% identical to the wild-type IL-2 amino acid sequence (SEQ ID NO: 2), an amino acid sequence that is 85%-99% identical to the wild-type IL-2 amino acid sequence (SEQ ID NO: 2), an amino acid sequence that is 90%-99% identical to the wild-type IL-2 amino acid sequence (SEQ ID NO: 2), or an amino acid sequence that is 95%-99% identical to the wild-type IL-2 amino acid sequence (SEQ ID NO: 2).

[0073] Embodiments also include IL-2 variants that selectively stimulate Treg cells and comprise an amino acid sequence having N88R and C125S mutations that is at least 60%, at least 61%, at least 62%, at least 63%, at least 64%, at least 65%, at least 66%, at least 67%, at least 68%, at least 69%, at least 70%, at least 71%, at least 72%, at least 73%, at least 74%, at least 75%, at least 76%, at least 77%, at least 78%, at least 79%, at least 80%, at least 81%, at least 82%, at least 83%, at least 84%, at least 85%, at least 86%, at least 87%, at least 88%, at least 89%, at least 90%, at least 91%, at least 92%, at least 93%, at least 94%, at least 95%, at least 96%, at least 97%, at least 98%, or at least 99% identical to the wild-type IL-2 amino acid sequence (SEQ ID NO: 2). Compounds herein include IL-2 variants comprising an amino acid sequence having N88R and C125S mutations that is 60%-99% identical to the wild-type IL-2 amino acid sequence (SEQ ID NO: 2), for example, an amino acid sequence that is 80%-99% identical to the wild-type IL-2 amino acid sequence (SEQ ID NO: 2), an amino acid sequence that is 85%-99% identical to the wild-type IL-2 amino acid sequence (SEQ ID NO: 2), an amino acid sequence that is 90%-99% identical to the wild-type IL-2 amino acid sequence (SEQ ID NO: 2), or an amino acid sequence that is 95%-99% identical to the wild-type IL-2 amino acid sequence (SEQ ID NO: 2).

[0074] Compounds also include IL-2 variants that selectively stimulate Treg cells and comprise an amino acid sequence having at least 60%, at least 61%, at least 62%, at least 63%, at least 64%, at least 65%, at least 66%, at least 67%, at least 68%, at least 69%, at least 70%, at least 71%, at least 72%, at least 73%, at least 74%, at least 75%, at least 76%, at least 77%, at least 78%, at least 79%, at least 80%, at least 81%, at least 82%, at least 83%, at least 84%, at least 85%, at least 86%, at least 87%, at least 88%, at least 89%, at least 90%, at least 91%, at least 92%, at least 93%, at least 94%, at least 95%, at least 96%, at least 97%, at least 98%, or at least 99% sequence identity to the wild-type IL-2 amino acid sequence (SEQ ID NO: 2). Compounds also include IL-2 variants that selectively stimulate Treg cells and comprise an amino acid sequence that is 60%-99% identical to the wild-type IL-2 amino acid sequence (SEQ ID NO: 2), for example, an amino acid sequence that is 80%-99% identical to the wild-type IL-2 amino acid sequence (SEQ ID NO: 2), an amino acid sequence that is 85%-99% identical to the wild-type IL-2 amino acid sequence (SEQ ID NO: 2), an amino acid sequence that is 90%-99% identical to the wild-type IL-2 amino acid sequence (SEQ ID NO: 2), or an amino acid sequence that is 95%-99% identical to the wild-type IL-2 amino acid sequence (SEQ ID NO: 2).

[0075] Various methods and software programs can be used to determine the homology between two or more peptides or nucleic acids, such as NCBI BLAST, Clustal W, MAFFT, Clustal Omega, AlignMe, Praline, or another suitable method or algorithm. In some embodiments, percent identity is calculated by FastDB based upon the following parameters: mismatch penalty of 1; gap penalty of 1; gap size penalty of 0.33; and joining penalty of 30.

[0076] An example of a useful algorithm is PILEUP. PILEUP creates a multiple sequence alignment from a group of related sequences using progressive, pairwise alignments. The algorithm can also plot a tree showing the clustering relationships used to create the alignment. A non-limiting example of PILEUP parameters includes a default gap weight of 3.00, a default gap length weight of 0.10, and weighted end gaps.

[0077] Another example of a useful algorithm is the BLAST algorithm. A non-limiting example of a BLAST program is the WU-BLAST-2 program. WU-BLAST-2 uses several search parameters, most of which are set, for example, to the default values. The adjustable parameters are set, for example, with the following values: overlap span=1, overlap fraction=0.125, word threshold (T)=ll. The HSP S and HSP S2 parameters are dynamic values and are established by the program itself depending upon the composition of the particular sequence and composition of the particular database against which the sequence of interest is being searched. The values can be adjusted to increase sensitivity.

[0078] An additional useful algorithm is gapped BLAST. Gapped BLAST uses BLOSUM-62 substitution scores; threshold T parameter set to 9; the two-hit method to trigger ungapped extensions, charges gap lengths of k a cost of 10+k; Xu set to 16, and Xg set to 40 for database search stage and to 67 for the output stage of the algorithms. Gapped alignments are triggered by a score corresponding to, for example, about 22 bits.

[0079] An additional useful tool is Clustal, a series of commonly used computer programs for multiple sequence alignment. Recent versions of Clustal include ClustalW, ClustalX and Clustal Omega. Default parameters for pairwise alignments and calculation of percent identity of protein sequences using the Clustal method are KTUPLE=1, GAP PENALTY=3, WINDOW=5 and DIAGONALS SAVED=5. For nucleic acids these parameters are KTUPLE=2, GAP PENALTY=5, WINDOW=4 and DIAGONALS SAVED=4.

[0080] Mutations can be installed at chosen sites or at random. For example, random mutagenesis at a target codon or region can provide mutants to be screened for an activity. Techniques for making substitution mutations at predetermined sites in DNA having a known sequence include, for example, M13 primer mutagenesis and PCR mutagenesis. Screening of the mutants can be accomplished, for example, using assays described herein.

[0081] Amino acid substitutions can be of single or multiple residues. Insertions can be, for example, from about 1 to about 20 amino acid residues, or more. Deletions can be, for example, from about 1 to about 20 amino acid residues, or more. Substitutions, deletions, insertions, or any combination thereof can occur in the sample compound.

Moieties that Bind ST2

[0082] ST2 (Interleukin 1 receptor-like 1) is a membrane-bound cytokine receptor and a member of the IL-1 receptor family. Human ST2 consists of a 310 amino acid (aa) extracellular domain (ECD) with three Ig-like domains, a 21 aa transmembrane segment, and a 207 aa cytoplasmic domain with an intracellular TIR domain (Tominaga, S. et al., 1992, Biochim. Biophys. Acta 1171:215; and Li, H. et al., 2000, Genomics 67:284). ST2 binds IL-33 and heterodimerizes with the IL-1 receptor accessory protein (1RAcP). In some embodiments, a compound of the present disclosure comprises a binding moiety that binds ST2. Compounds herein can have increased or decreased affinity for ST2 or for the ST2-1RAcP receptor complex. Some compounds may have enhanced affinity for ST2. Other compounds may have reduced affinity for 1RAcP, which would lead to reduced ability to activate the IL-33 receptor.

[0083] ST2-binding ligands may include antibodies and antigen-binding antibody fragments with binding affinity toward ST2. As used herein, an “antibody” is a protein that includes at least one complementary determining region that binds to a specific target antigen, e.g. ST2. In a full-length antibody, each heavy chain is comprised of a heavy chain variable region (abbreviated herein as HCVR or VH) and a heavy chain constant region. The heavy chain constant region is comprised of three domains, CH1, CH2 and CH3. Each light chain is comprised of a light chain variable region (abbreviated herein as LCVR or VL) and a light chain constant region. The light chain constant region is comprised of one domain, CL. The VH and VL regions can be further subdivided into regions of hypervariability, termed complementarity determining regions (CDR), interspersed with regions that are more conserved, termed framework regions (FR). Each VH and VL is composed of three CDRs and four FRs, arranged from amino-terminus to carboxy-terminus in the following order: FR1, CDR1, FR2, CDR2, FR3, CDR3, FR4. For example, the VH region comprises three CDRs designated as CDRH1, CDRH2, CDRH3, and the VL region comprises three CDRs designated as CDRL1, CDRL2, and CDRL3. The light chains of the immunoglobulin can be of types kappa or lambda. For example, an antibody can be a monoclonal antibody, a modified antibody, a chimeric antibody, a reshaped antibody, or a humanized antibody. The term “monoclonal antibody”, as used herein, refers to a population of antibody molecules that contain only one species of an antigen binding site capable of immunoreacting with a particular epitope. Antibodies can be obtained from commercial sources or produced using known methods. The antibody can be any immunoglobulin type, e.g., IgG, IgM, IgY, IgA1, IgA2, IgD, or IgE. In an embodiment, the antibody can be a human antibody.

[0084] Methods and techniques for identifying CDRs within HCVR and LCVR amino acid sequences are known in the art and can be applied to identify CDRs within the specified HCVR and/or LCVR amino acid sequences disclosed herein. Conventional definitions that can be applied to identify the boundaries of CDRs include the Kabat definition, the Chothia definition, and the AbM definition. In general terms, the Kabat definition is based on sequence variability, the Chothia definition is based on the location of the structural loop regions, and the AbM definition is a compromise between the Kabat and Chothia approaches. For example, CDRs can be defined according to the Kabat numbering system (Kabat et al., Sequences of proteins of immunological interest, 5.sup.th Ed., U.S. Department of Health and Human Services, NIH, 1991, and later editions). There are three heavy-chain CDRs and three light-chain CDRs. Here, the terms “CDR” and “CDRs” are used to indicate, depending on the case, one or more, or even all, of the regions containing the majority of the amino acid residues responsible for the antibody's binding affinity for the antigen or epitope it recognizes. See, e.g., Kabat, “Sequences of Proteins of Immunological Interest,” National Institutes of Health, Bethesda, Md. (1991); Al-Lazikani et al., J. Mol. Biol. 273:927-948 (1997); and Martin et al., Proc. Natl. Acad. Sci. USA 86:9268-9272 (1989).

[0085] The CDR sequences disclosed herein, for example in Table 2D, indicate the hypervariable regions of the heavy and light chains of the immunoglobulins as defined by IMGT.

[0086] The IMGT unique numbering has been defined to compare the variable domains whatever the antigen receptor, the chain type, or the species [Lefranc M.-P., Immunology Today 18, 509 (1997)/Lefranc M.-P., The Immunologist, 7, 132-136 (1999)/Lefranc, M.-P., Pommie, C., Ruiz, M., Giudicelli, V., Foulquier, E., Truong, L., Thouvenin-Contet, V. and Lefranc, Dev. Comp. Immunol., 27, 55-77 (2003)]. In the IMGT unique numbering, the conserved amino acids always have the same position, for instance cystein 23 (1st-CYS), tryptophan 41 (CONSERVED-TRP), hydrophobic amino acid 89, cystein 104 (2nd-CYS), phenylalanine or tryptophan 118 (J-PHE or J-TRP). The IMGT unique numbering provides a standardized delimitation of the framework regions (FR1-IMGT: positions 1 to 26, FR2-IMGT: 39 to 55, FR3-IMGT: 66 to 104 and FR4-IMGT: 118 to 128) and of the complementarity determining regions: CDR1-IMGT: 27 to 38, CDR2-IMGT: 56 to 65 and CDR3-IMGT: 105 to 117. As gaps represent unoccupied positions, the CDR-IMGT lengths (shown between brackets and separated by dots, e.g. [8.8.13]) become crucial information. The IMGT unique numbering is used in 2D graphical representations, designated as IMGT Colliers de Perles [Ruiz, M. and Lefranc, M.-P., Immunogenetics, 53, 857-883 (2002)/Kaas, Q. and Lefranc, M.-P., Current Bioinformatics, 2, 21-30 (2007)], and in 3D structures in IMGT/3D structure-DB [Kaas, Q., Ruiz, M. and Lefranc, M.-P., T cell receptor and MHC structural data. Nucl. Acids. Res., 32, D208-D210 (2004)].

[0087] The term “antigen-binding fragment” of an antibody (or simply “antibody fragment”), as used herein, refers to one or more fragments of an antibody that retain the ability to specifically bind to an antigen (e.g., ST1). It has been shown that the antigen-binding function of an antibody can be performed by fragments of a full-length antibody. Antigen-binding antibody fragments (i.e. antibody fragments that specifically bind ST2) suitable for use in the invention include, but are not limited to, a Fab fragment, a F(ab′)2 fragment, a Fd fragment, a Fv fragment, a dAb fragment, single chain Fv (scFv), a dimerized variable region (V region) fragment (diabody), a disulfide-stabilized V region fragment (dsFv), affibodies, antibody mimetics, and one or more isolated complementarity determining regions (CDR) that retain specific binding to ST2. As used herein, an “isolated” CDR is a CDR not in the context of a naturally occurring antibody.

[0088] A Fab fragment consists of the light chain variable region (VL), the heavy chain variable region (VH), the light chain constant region (CL) and the heavy chain constant CH1 domain. A F(ab′)2 fragment is a bivalent fragment comprising two linked Fab fragments. An Fd fragment consists of the VH and CH1 domains. The Fv fragment consists of the VL and VH domains of a single antibody. A dAb fragment consists of a VH or a VL domain. A single chain Fv molecule (scFv) consists of a VH domain and a VL domain linked by a peptide linker which allows the two domains to associate to form an antigen binding site. Fv, scFv or diabody molecules may be stabilized by the incorporation of disulphide bridges linking the VH and VL domains. Other examples of binding fragments are Fab′, which differs from Fab fragments by the addition of a few residues at the carboxyl terminus of the heavy chain CH1 domain, including one or more cysteines from the antibody hinge region, and Fab′-SH, which is a Fab′ fragment in which the cysteine residue(s) of the constant domains bear a free thiol group.

[0089] Furthermore, although the two domains of the Fv fragment, VL and VH, are coded for by separate genes, they can be joined, using recombinant methods, by a synthetic linker that enables them to be made as a single protein chain in which the VL and VH regions pair to form monovalent molecules (known as single chain Fv (scFv); see e.g., Bird et al. (1988) Science 242:423-426; and Huston et al. (1988) Proc. Natl. Acad. Sci. USA 85:5879-5883). Such single chain antibodies are also intended to be encompassed within the term “antigen-binding fragment” of an antibody. Other forms of single chain antibodies, such as diabodies are also encompassed. Diabodies are bivalent, bispecific antibodies in which VH and VL domains are expressed on a single polypeptide chain, but using a linker that is too short to allow for pairing between the two domains on the same chain, thereby forcing the domains to pair with complementary domains of another chain and creating two antigen binding sites (see e.g., Holliger, P., et al. (1993) Proc. Natl. Acad. Sci. USA 90:6444-6448; Poljak, R. J., et al. (1994) Structure 2:1121-1123). Such antibody binding fragments are known in the art (Kontermann and Dubel eds., Antibody Engineering (2001) Springer-Verlag. New York. 790 pp. (ISBN 3-540-41354-5).

[0090] Polyclonal antibodies can be prepared by immunizing a suitable subject with a protein of the invention as an immunogen. The antibody titer in the immunized subject can be monitored over time by standard techniques, such as with an enzyme linked immunosorbent assay (ELISA) using immobilized polypeptide. At an appropriate time after immunization, e.g., when the specific antibody titers are highest, antibody-producing cells can be obtained from the subject and used to prepare monoclonal antibodies (mAb) by standard techniques, such as the hybridoma technique originally described by Kohler and Milstein (1975) Nature 256:495-497, the human B cell hybridoma technique (see Kozbor et al., 1983, Immunol. Today 4:72), the EBV-hybridoma technique (see Cole et al., pp. 77-96 In Monoclonal Antibodies and Cancer Therapy, Alan R. Liss, Inc., 1985) or trioma techniques. The technology for producing hybridomas is well known (see generally Current Protocols in Immunology, Coligan et al. ed., John Wiley & Sons, New York, 1994). Hybridoma cells producing a monoclonal antibody of the invention are detected by screening the hybridoma culture supernatants for antibodies that bind the polypeptide of interest (i.e. ST2), e.g., using a standard ELISA assay.

[0091] Alternative to preparing monoclonal antibody-secreting hybridomas, a monoclonal antibody directed against ST2 can be identified and isolated by screening a recombinant combinatorial immunoglobulin library (e.g., an antibody phage display library) with the polypeptide of interest. Kits for generating and screening phage display libraries are commercially available (e.g., the Pharmacia Recombinant Phage Antibody System, Catalog No. 27-9400-01; and the Stratagene SurfZAP Phage Display Kit, Catalog No. 240612). Additionally, examples of methods and reagents particularly amenable for use in generating and screening antibody display library can be found in, for example, U.S. Pat. No. 5,223,409; PCT Publication No. WO 92/18619; PCT Publication No. WO 91/17271; PCT Publication No. WO 92/20791; PCT Publication No. WO 92/15679; PCT Publication No. WO 93/01288; PCT Publication No. WO 92/01047; PCT Publication No. WO 92/09690; PCT Publication No. WO 90/02809; Fuchs et al. (1991) Bio/Technology 9:1370-1372; Hay et al. (1992) Hum. Antibod. Hybridomas 3:81-85; Huse et al. (1989) Science 246:1275-1281; Griffiths et al. (1993) EMBO J. 12:725-734.

[0092] Recombinant antibodies that specifically bind ST2 can also be prepared. Recombinant antibodies include, but are not limited to, chimeric and humanized monoclonal antibodies, comprising both human and non-human portions, single-chain antibodies and multi-specific antibodies. A “fully human” antibody or antibody fragment as defined herein refers to an antibody or antibody fragment in which each portion of the antibody or antibody fragment is of human origin. A chimeric antibody is a molecule in which different portions are derived from different animal species, such as those having a variable region derived from a murine mAb and a human immunoglobulin constant region. (See, e.g., Cabilly et al., U.S. Pat. No. 4,816,567; and Boss et al., U.S. Pat. No. 4,816,397, which are incorporated herein by reference in their entirety.) Single-chain antibodies have an antigen binding site and consist of a single polypeptide. They can be produced by techniques known in the art, for example using methods described in Ladner et. al U.S. Pat. No. 4,946,778 (which is incorporated herein by reference in its entirety); Bird et al., (1988) Science 242:423-426; Whitlow et al., (1991) Methods in Enzymology 2:1-9; Whitlow et al., (1991) Methods in Enzymology 2:97-105; and Huston et al., (1991) Methods in Enzymology Molecular Design and Modeling: Concepts and Applications 203:46-88.

[0093] Humanized antibodies are antibody molecules from non-human species having one or more complementarity determining regions (CDRs) from the non-human species and a framework region from a human immunoglobulin molecule. (See, e.g., Queen, U.S. Pat. No. 5,585,089, which is incorporated herein by reference in its entirety.) Humanized monoclonal antibodies can be produced by recombinant DNA techniques known in the art, for example using methods described in PCT Publication No. WO 87/02671; European Patent Application 184,187; European Patent Application 171,496; European Patent Application 173,494; PCT Publication No. WO 86/01533; U.S. Pat. No. 4,816,567; European Patent Application 125,023; Better et al. (1988) Science 240:1041-1043; Liu et al. (1987) Proc. Natl. Acad. Sci. USA 84:3439-3443; Liu et al. (1987) J. Immunol. 139:3521-3526; Sun et al. (1987) Proc. Natl. Acad. Sci. USA 84:214-218; Nishimura et al. (1987) Cancer Res. 47:999-1005; Wood et al. (1985) Nature 314:446-449; and Shaw et al. (1988) J. Natl. Cancer Inst. 80:1553-1559); Morrison (1985) Science 229:1202-1207; Oi et al. (1986) Bio/Techniques 4:214; U.S. Pat. No. 5,225,539; Jones et al. (1986) Nature 321:552-525; Verhoeyan et al. (1988) Science 239:1534; and Beidler et al. (1988) J. Immunol. 141:4053-4060.

[0094] More particularly, humanized antibodies can be produced, for example, using transgenic mice which are incapable of expressing endogenous immunoglobulin heavy and light chains genes, but which can express human heavy and light chain genes. The transgenic mice are immunized in the normal fashion with a selected antigen, e.g., ST2. Monoclonal antibodies directed against the antigen can be obtained using conventional hybridoma technology. The human immunoglobulin transgenes harbored by the transgenic mice rearrange during B cell differentiation, and subsequently undergo class switching and somatic mutation. Thus, using such a technique, it is possible to produce IgG, IgA and IgE antibodies. For an overview of this technology for producing human antibodies, see Lonberg and Huszar (1995) Int. Rev. Immunol. 13:65-93). For a detailed discussion of this technology for producing human antibodies and human monoclonal antibodies and protocols for producing such antibodies, see, e.g., U.S. Pat. Nos. 5,625,126; 5,633,425; 5,569,825; 5,661,016; and 5,545,806. In addition, companies can be engaged to provide human antibodies directed against a selected antigen (e.g. ST2) using technology similar to that described above.

[0095] Completely human antibodies which recognize ST2 can be generated using a technique referred to as “guided selection.” In this approach a selected non-human monoclonal antibody, e.g., a murine antibody, is used to guide the selection of a completely human antibody recognizing the same epitope (Jespers et al., 1994, Bio/technology 12:899-903).

[0096] The ST2 antibodies can be isolated after production (e.g., from the blood or serum of the subject) or synthesis and further purified by well-known techniques. For example, IgG antibodies can be purified using protein A chromatography. Antibodies specific for ST2 can be selected or (e.g., partially purified) or purified by, e.g., affinity chromatography. For example, a recombinantly expressed and purified (or partially purified) ST2 protein is produced, and covalently or non-covalently coupled to a solid support such as, for example, a chromatography column. The column can then be used to affinity purify antibodies specific for ST2 from a sample containing antibodies directed against a large number of different epitopes, thereby generating a substantially purified antibody composition, i.e., one that is substantially free of contaminating antibodies.

[0097] Antibodies that bind ST2 are well known in the art. For example, US2017/0002079 describes a range of ST2-binding antibodies (e.g. Ab1, Ab2, Ab3, Ab4 and Ab12-Ab36) directed against human ST2 that were prepared using XENOMOUSE® technology (U.S. Pat. Nos. 6,114,598; 6,162,963; 6,833,268; 7,049,426; 7,064,244, which are incorporated herein by reference in their entirety; Green et al., 1994, Nature Genetics 7:13-21; Mendez et al., 1997, Nature Genetics 15:146-156; Green and Jakobovitis, 1998, J. Ex. Med. 188:483-495, Kellermann and Green, 2002, Current Opinion in Biotechnology, 13:593-597). See, in particular, Example 2 of US2017/0002079, which is incorporated by reference herein in its entirety. Anti-ST2 antibodies directed against human ST2 are also described in WO2012/113813 (e.g. monoclonal antibody ral70) and U.S. Pat. No. 7,087,396 (e.g. monoclonal antibodies 2A5, FB9 and HB12), each of which is incorporated by reference herein in its entirety. For example, U.S. Pat. No. 7,087,396 describes preparation of monoclonal antibodies directed to human ST2 in Example 1. ST2-binding antibodies are also commercially available (e.g. R&D Systems, Inc., Minneapolis, Minn., Cat. Nos. MAB523 and AF523). MAB523 is a monoclonal mouse IgG1 antibody that detects human ST2. AF523 is an antigen affinity-purified polyclonal goat IgG1 that detects human ST2.

[0098] In some embodiments, the antibody or antigen-binding fragment thereof that specifically binds ST2 comprises a heavy chain and a light chain. In some embodiments, the heavy chain comprises the amino acid sequence of SEQ ID NO: 16, and the light chain comprises the amino acid sequence of SEQ ID NO: 19 (Ab2). In some embodiments, the heavy chain comprises the amino acid sequence of SEQ ID NO: 17, and the light chain comprises the amino acid sequence of SEQ ID NO: 20 (Ab4). In some embodiments, the heavy chain comprises an amino acid sequence having at least 90%, at least 95%, at least 96%, at least 97%, at least 98%, or at least 99% sequence identity to the amino acid sequence of SEQ ID NO: 16. In some embodiments, the heavy chain comprises an amino acid sequence having at least 90%, at least 95%, at least 96%, at least 97%, at least 98%, or at least 99% sequence identity to the amino acid sequence of SEQ ID NO: 17. In some embodiments, the light chain comprises an amino acid sequence having at least 90%, at least 95%, at least 96%, at least 97%, at least 98%, or at least 99% sequence identity to the amino acid sequence of SEQ ID NO: 19. In some embodiments, the light chain comprises an amino acid sequence having at least 90%, at least 95%, at least 96%, at least 97%, at least 98%, or at least 99% sequence identity to the amino acid sequence of SEQ ID NO: 20.

[0099] In some embodiments, the antibody or antigen-binding fragment thereof that specifically binds ST2 comprises a combination of a heavy chain and a light chain as shown in Table 1 below. Table 1 lists the human ST2 IgG1 antibodies that were identified through screening of a phage display human antibody library, as described in Example 3. The IgG1 heavy chain and light chain for each of the 109 ST2 antibodies identified in the screen are provided. For example, in some embodiments, the antibody or antigen-binding fragment thereof that specifically binds ST2 comprises a heavy chain comprising the amino acid sequence of SEQ ID NO: 23 and a light chain comprising the amino acid sequence of SEQ ID NO: 241 (e.g. ST2 Antibody 1). In some embodiments, the antibody or antigen-binding fragment thereof that specifically binds ST2 comprises a heavy chain encoded by the nucleic acid sequence of SEQ ID NO: 22 and a light chain encoded by the nucleic acid sequence of SEQ ID NO: 240 (e.g. ST2 Antibody 1). In some embodiments, the antibody or antigen-binding fragment thereof that specifically binds ST2 comprises a heavy chain comprising an amino acid sequence having at least 90%, at least 95%, at least 96%, at least 97%, at least 98%, or at least 99% sequence identity to an IgG1 heavy chain amino acid sequence listed in Table 1. In some embodiments, the antibody or antigen-binding fragment thereof that specifically binds ST2 comprises a light chain comprising an amino acid sequence having at least 90%, at least 95%, at least 96%, at least 97%, at least 98%, or at least 99% sequence identity to a light chain amino acid sequence listed in Table 1. In some embodiments, the antibody or antigen-binding fragment thereof that specifically binds ST2 comprises a heavy chain encoded by a nucleic acid sequence having at least 90%, at least 95%, at least 96%, at least 97%, at least 98%, or at least 99% sequence identity to an IgG1 heavy chain nucleic acid sequence listed in Table 1. In some embodiments, the antibody or antigen-binding fragment thereof that specifically binds ST2 comprises a light chain encoded by a nucleic acid sequence having at least 90%, at least 95%, at least 96%, at least 97%, at least 98%, or at least 99% sequence identity to a light chain nucleic acid sequence listed in Table 1.

[0100] In some embodiments, the antibody or antigen-binding fragment thereof that specifically binds ST2 comprises or consists of a human ST2 IgG1 antibody listed in Table 1. In some embodiments, the antibody or antigen-binding fragment thereof that specifically binds ST2 comprises or consists of a human ST2 IgG1 antibody having at least 90%, at least 95%, at least 96%, at least 97%, at least 98%, or at least 99% sequence identity to an ST2 antibody listed in Table 1.

[0101] The human ST2 IgG1 antibody heavy chains in Table 1 consist of the signal peptide (amino acids 1-24), the heavy chain variable region, the CH1 domain, and the Fc domain. For example, in SEQ ID NO: 23, amino acids 1-24 are the human IgG1 heavy chain signal peptide, amino acids 25-147 are the heavy chain variable region, amino acids 148-251 are the human IgG1 heavy chain constant domain CH1, and amino acids 252-476 are the human IgG1 Fc domain. The human ST2 IgG1 antibody lights chains in Table 1 consist of the signal peptide (amino acids 1-20), the light chain variable region, and the light chain constant domain. For example, in SEQ ID NO: 241, amino acids 1-20 are the human IgG1 light chain signal peptide, amino acids 21-132 are the light chain variable region, and amino acids 133-239 are the human IgG1 light chain constant domain.

TABLE 1
Human ST2 IgG1 antibody heavy chains and light chains.

| Human | IgG1 Heavy | Light Chain | IgG1 Heavy | Light Chain |
|---|---|---|---|---|
| ST2 IgG1 | Chain Amino | (Kappa) Amino | Chain Nucleic | (Kappa) Nucleic |
| Antibody | Acid Sequence | Acid Sequence | Acid Sequence | AcidSequence |
| 1 | SEQ ID NO: 23 | SEQ ID NO: 241 | SEQ ID NO: 22 | SEQ ID NO: 240 |
| 2 | SEQ ID NO: 25 | SEQ ID NO: 243 | SEQ ID NO: 24 | SEQ ID NO: 242 |
| 3 | SEQ ID NO: 27 | SEQ ID NO: 245 | SEQ ID NO: 26 | SEQ ID NO: 244 |
| 4 | SEQ ID NO: 29 | SEQ ID NO: 247 | SEQ ID NO: 28 | SEQ ID NO: 246 |
| 5 | SEQ ID NO: 31 | SEQ ID NO: 249 | SEQ ID NO: 30 | SEQ ID NO: 248 |
| 6 | SEQ ID NO: 33 | SEQ ID NO: 251 | SEQ ID NO: 32 | SEQ ID NO: 250 |
| 7 | SEQ ID NO: 35 | SEQ ID NO: 253 | SEQ ID NO: 34 | SEQ ID NO: 252 |
| 8 | SEQ ID NO: 37 | SEQ ID NO: 255 | SEQ ID NO: 36 | SEQ ID NO: 254 |
| 9 | SEQ ID NO: 39 | SEQ ID NO: 257 | SEQ ID NO: 38 | SEQ ID NO: 256 |
| 10 | SEQ ID NO: 41 | SEQ ID NO: 259 | SEQ ID NO: 40 | SEQ ID NO: 258 |
| 11 | SEQ ID NO: 43 | SEQ ID NO: 261 | SEQ ID NO: 42 | SEQ ID NO: 260 |
| 12 | SEQ ID NO: 45 | SEQ ID NO: 263 | SEQ ID NO: 44 | SEQ ID NO: 262 |
| 13 | SEQ ID NO: 47 | SEQ ID NO: 265 | SEQ ID NO: 46 | SEQ ID NO: 264 |
| 14 | SEQ ID NO: 49 | SEQ ID NO: 267 | SEQ ID NO: 48 | SEQ ID NO: 266 |
| 15 | SEQ ID NO: 51 | SEQ ID NO: 269 | SEQ ID NO: 50 | SEQ ID NO: 268 |
| 16 | SEQ ID NO: 53 | SEQ ID NO: 271 | SEQ ID NO: 52 | SEQ ID NO: 270 |
| 17 | SEQ ID NO: 55 | SEQ ID NO: 273 | SEQ ID NO: 54 | SEQ ID NO: 272 |
| 18 | SEQ ID NO: 57 | SEQ ID NO: 275 | SEQ ID NO: 56 | SEQ ID NO: 274 |
| 19 | SEQ ID NO: 59 | SEQ ID NO: 277 | SEQ ID NO: 58 | SEQ ID NO: 276 |
| 20 | SEQ ID NO: 61 | SEQ ID NO: 279 | SEQ ID NO: 60 | SEQ ID NO: 278 |
| 21 | SEQ ID NO: 63 | SEQ ID NO: 281 | SEQ ID NO: 62 | SEQ ID NO: 280 |
| 22 | SEQ ID NO: 65 | SEQ ID NO: 283 | SEQ ID NO: 64 | SEQ ID NO: 282 |
| 23 | SEQ ID NO: 67 | SEQ ID NO: 285 | SEQ ID NO: 66 | SEQ ID NO: 284 |
| 24 | SEQ ID NO: 69 | SEQ ID NO: 287 | SEQ ID NO: 68 | SEQ ID NO: 286 |
| 25 | SEQ ID NO: 71 | SEQ ID NO: 289 | SEQ ID NO: 70 | SEQ ID NO: 288 |
| 26 | SEQ ID NO: 73 | SEQ ID NO: 291 | SEQ ID NO: 72 | SEQ ID NO: 290 |
| 27 | SEQ ID NO: 75 | SEQ ID NO: 293 | SEQ ID NO: 74 | SEQ ID NO: 292 |
| 28 | SEQ ID NO: 77 | SEQ ID NO: 295 | SEQ ID NO: 76 | SEQ ID NO: 294 |
| 29 | SEQ ID NO: 79 | SEQ ID NO: 297 | SEQ ID NO: 78 | SEQ ID NO: 296 |
| 30 | SEQ ID NO: 81 | SEQ ID NO: 299 | SEQ ID NO: 80 | SEQ ID NO: 298 |
| 31 | SEQ ID NO: 83 | SEQ ID NO: 301 | SEQ ID NO: 82 | SEQ ID NO: 300 |
| 32 | SEQ ID NO: 85 | SEQ ID NO: 303 | SEQ ID NO: 84 | SEQ ID NO: 302 |
| 33 | SEQ ID NO: 87 | SEQ ID NO: 305 | SEQ ID NO: 86 | SEQ ID NO: 304 |
| 34 | SEQ ID NO: 89 | SEQ ID NO: 307 | SEQ ID NO: 88 | SEQ ID NO: 306 |
| 35 | SEQ ID NO: 91 | SEQ ID NO: 309 | SEQ ID NO: 90 | SEQ ID NO: 308 |
| 36 | SEQ ID NO: 93 | SEQ ID NO: 311 | SEQ ID NO: 92 | SEQ ID NO: 310 |
| 37 | SEQ ID NO: 95 | SEQ ID NO: 313 | SEQ ID NO: 94 | SEQ ID NO: 312 |
| 38 | SEQ ID NO: 97 | SEQ ID NO: 315 | SEQ ID NO: 96 | SEQ ID NO: 314 |
| 39 | SEQ ID NO: 99 | SEQ ID NO: 317 | SEQ ID NO: 98 | SEQ ID NO: 316 |
| 40 | SEQ ID NO: 101 | SEQ ID NO: 319 | SEQ ID NO: 100 | SEQ ID NO: 318 |
| 41 | SEQ ID NO: 103 | SEQ ID NO: 321 | SEQ ID NO: 102 | SEQ ID NO: 320 |
| 42 | SEQ ID NO: 105 | SEQ ID NO: 323 | SEQ ID NO: 104 | SEQ ID NO: 322 |
| 43 | SEQ ID NO: 107 | SEQ ID NO: 325 | SEQ ID NO: 106 | SEQ ID NO: 324 |
| 44 | SEQ ID NO: 109 | SEQ ID NO: 327 | SEQ ID NO: 108 | SEQ ID NO: 326 |
| 45 | SEQ ID NO: 111 | SEQ ID NO: 329 | SEQ ID NO: 110 | SEQ ID NO: 328 |
| 46 | SEQ ID NO: 113 | SEQ ID NO: 331 | SEQ ID NO: 112 | SEQ ID NO: 330 |
| 47 | SEQ ID NO: 115 | SEQ ID NO: 333 | SEQ ID NO: 114 | SEQ ID NO: 332 |
| 48 | SEQ ID NO: 117 | SEQ ID NO: 335 | SEQ ID NO: 116 | SEQ ID NO: 334 |
| 49 | SEQ ID NO: 119 | SEQ ID NO: 337 | SEQ ID NO: 118 | SEQ ID NO: 336 |
| 50 | SEQ ID NO: 121 | SEQ ID NO: 339 | SEQ ID NO: 120 | SEQ ID NO: 338 |
| 51 | SEQ ID NO: 123 | SEQ ID NO: 341 | SEQ ID NO: 122 | SEQ ID NO: 340 |
| 52 | SEQ ID NO: 125 | SEQ ID NO: 343 | SEQ ID NO: 124 | SEQ ID NO: 342 |
| 53 | SEQ ID NO: 127 | SEQ ID NO: 345 | SEQ ID NO: 126 | SEQ ID NO: 344 |
| 54 | SEQ ID NO: 129 | SEQ ID NO: 347 | SEQ ID NO: 128 | SEQ ID NO: 346 |
| 55 | SEQ ID NO: 131 | SEQ ID NO: 349 | SEQ ID NO: 130 | SEQ ID NO: 348 |
| 56 | SEQ ID NO: 133 | SEQ ID NO: 351 | SEQ ID NO: 132 | SEQ ID NO: 350 |
| 57 | SEQ ID NO: 135 | SEQ ID NO: 353 | SEQ ID NO: 134 | SEQ ID NO: 352 |
| 58 | SEQ ID NO: 137 | SEQ ID NO: 355 | SEQ ID NO: 136 | SEQ ID NO: 354 |
| 59 | SEQ ID NO: 139 | SEQ ID NO: 357 | SEQ ID NO: 138 | SEQ ID NO: 356 |
| 60 | SEQ ID NO: 141 | SEQ ID NO: 359 | SEQ ID NO: 140 | SEQ ID NO: 358 |
| 61 | SEQ ID NO: 143 | SEQ ID NO: 361 | SEQ ID NO: 142 | SEQ ID NO: 360 |
| 62 | SEQ ID NO: 145 | SEQ ID NO: 363 | SEQ ID NO: 144 | SEQ ID NO: 362 |
| 63 | SEQ ID NO: 147 | SEQ ID NO: 365 | SEQ ID NO: 146 | SEQ ID NO: 364 |
| 64 | SEQ ID NO: 149 | SEQ ID NO: 367 | SEQ ID NO: 148 | SEQ ID NO: 366 |
| 65 | SEQ ID NO: 151 | SEQ ID NO: 369 | SEQ ID NO: 150 | SEQ ID NO: 368 |
| 66 | SEQ ID NO: 153 | SEQ ID NO: 371 | SEQ ID NO: 152 | SEQ ID NO: 370 |
| 67 | SEQ ID NO: 155 | SEQ ID NO: 373 | SEQ ID NO: 154 | SEQ ID NO: 372 |
| 68 | SEQ ID NO: 157 | SEQ ID NO: 375 | SEQ ID NO: 156 | SEQ ID NO: 374 |
| 69 | SEQ ID NO: 159 | SEQ ID NO: 377 | SEQ ID NO: 158 | SEQ ID NO: 376 |
| 70 | SEQ ID NO: 161 | SEQ ID NO: 379 | SEQ ID NO: 160 | SEQ ID NO: 378 |
| 71 | SEQ ID NO: 163 | SEQ ID NO: 381 | SEQ ID NO: 162 | SEQ ID NO: 380 |
| 72 | SEQ ID NO: 165 | SEQ ID NO: 383 | SEQ ID NO: 164 | SEQ ID NO: 382 |
| 73 | SEQ ID NO: 167 | SEQ ID NO: 385 | SEQ ID NO: 166 | SEQ ID NO: 384 |
| 74 | SEQ ID NO: 169 | SEQ ID NO: 387 | SEQ ID NO: 168 | SEQ ID NO: 386 |
| 75 | SEQ ID NO: 171 | SEQ ID NO: 389 | SEQ ID NO: 170 | SEQ ID NO: 388 |
| 76 | SEQ ID NO: 173 | SEQ ID NO: 391 | SEQ ID NO: 172 | SEQ ID NO: 390 |
| 77 | SEQ ID NO: 175 | SEQ ID NO: 393 | SEQ ID NO: 174 | SEQ ID NO: 392 |
| 78 | SEQ ID NO: 177 | SEQ ID NO: 395 | SEQ ID NO: 176 | SEQ ID NO: 394 |
| 79 | SEQ ID NO: 179 | SEQ ID NO: 397 | SEQ ID NO: 178 | SEQ ID NO: 396 |
| 80 | SEQ ID NO: 181 | SEQ ID NO: 399 | SEQ ID NO: 180 | SEQ ID NO: 398 |
| 81 | SEQ ID NO: 183 | SEQ ID NO: 401 | SEQ ID NO: 182 | SEQ ID NO: 400 |
| 82 | SEQ ID NO: 185 | SEQ ID NO: 403 | SEQ ID NO: 184 | SEQ ID NO: 402 |
| 83 | SEQ ID NO: 187 | SEQ ID NO: 405 | SEQ ID NO: 186 | SEQ ID NO: 404 |
| 84 | SEQ ID NO: 189 | SEQ ID NO: 407 | SEQ ID NO: 188 | SEQ ID NO: 406 |
| 85 | SEQ ID NO: 191 | SEQ ID NO: 409 | SEQ ID NO: 190 | SEQ ID NO: 408 |
| 86 | SEQ ID NO: 193 | SEQ ID NO: 411 | SEQ ID NO: 192 | SEQ ID NO: 410 |
| 87 | SEQ ID NO: 195 | SEQ ID NO: 413 | SEQ ID NO: 194 | SEQ ID NO: 412 |
| 88 | SEQ ID NO: 197 | SEQ ID NO: 415 | SEQ ID NO: 196 | SEQ ID NO: 414 |
| 89 | SEQ ID NO: 199 | SEQ ID NO: 417 | SEQ ID NO: 198 | SEQ ID NO: 416 |
| 90 | SEQ ID NO: 201 | SEQ ID NO: 419 | SEQ ID NO: 200 | SEQ ID NO: 418 |
| 91 | SEQ ID NO: 203 | SEQ ID NO: 421 | SEQ ID NO: 202 | SEQ ID NO: 420 |
| 92 | SEQ ID NO: 205 | SEQ ID NO: 423 | SEQ ID NO: 204 | SEQ ID NO: 422 |
| 93 | SEQ ID NO: 207 | SEQ ID NO: 425 | SEQ ID NO: 206 | SEQ ID NO: 424 |
| 94 | SEQ ID NO: 209 | SEQ ID NO: 427 | SEQ ID NO: 208 | SEQ ID NO: 426 |
| 95 | SEQ ID NO: 211 | SEQ ID NO: 429 | SEQ ID NO: 210 | SEQ ID NO: 428 |
| 96 | SEQ ID NO: 213 | SEQ ID NO: 431 | SEQ ID NO: 212 | SEQ ID NO: 430 |
| 97 | SEQ ID NO: 215 | SEQ ID NO: 433 | SEQ ID NO: 214 | SEQ ID NO: 432 |
| 98 | SEQ ID NO: 217 | SEQ ID NO: 435 | SEQ ID NO: 216 | SEQ ID NO: 434 |
| 99 | SEQ ID NO: 219 | SEQ ID NO: 437 | SEQ ID NO: 218 | SEQ ID NO: 436 |
| 100 | SEQ ID NO: 221 | SEQ ID NO: 439 | SEQ ID NO: 220 | SEQ ID NO: 438 |
| 101 | SEQ ID NO: 223 | SEQ ID NO: 441 | SEQ ID NO: 222 | SEQ ID NO: 440 |
| 102 | SEQ ID NO: 225 | SEQ ID NO: 443 | SEQ ID NO: 224 | SEQ ID NO: 442 |
| 103 | SEQ ID NO: 227 | SEQ ID NO: 445 | SEQ ID NO: 226 | SEQ ID NO: 444 |
| 104 | SEQ ID NO: 229 | SEQ ID NO: 447 | SEQ ID NO: 228 | SEQ ID NO: 446 |
| 105 | SEQ ID NO: 231 | SEQ ID NO: 449 | SEQ ID NO: 230 | SEQ ID NO: 448 |
| 106 | SEQ ID NO: 233 | SEQ ID NO: 451 | SEQ ID NO: 232 | SEQ ID NO: 450 |
| 107 | SEQ ID NO: 235 | SEQ ID NO: 453 | SEQ ID NO: 234 | SEQ ID NO: 452 |
| 108 | SEQ ID NO: 237 | SEQ ID NO: 455 | SEQ ID NO: 236 | SEQ ID NO: 454 |
| 109 | SEQ ID NO: 239 | SEQ ID NO: 457 | SEQ ID NO: 238 | SEQ ID NO: 456 |

[0102] In some embodiments, the antibody or antigen-binding fragment thereof that specifically binds ST2 comprises or consists of a fragment of a human ST2 IgG1 antibody listed in Table 1 that specifically binds ST2. For example, in some embodiments, the antibody or antigen-binding fragment thereof that specifically binds ST2 comprises or consists of an IgG1 heavy chain fragment listed in Table 2A or 2B. Table 2A lists fragments of the IgG1 heavy chain amino acid sequences listed in Table 1 in which the Fc region has been removed, i.e. the fragment consists of the heavy chain variable region and the C_{H}1 heavy chain constant region. Table 2B lists the heavy chain variable region of each ST2 antibody. In some embodiments, the antibody or antigen-binding fragment thereof that specifically binds ST2 comprises an IgG1 heavy chain fragment having at least 85% sequence identity to an IgG1 heavy chain fragment listed in Table 2A or 2B. In some embodiments, the antibody or antigen-binding fragment thereof that specifically binds ST2 comprises an IgG1 heavy chain fragment having at least 90% sequence identity to an IgG1 heavy chain fragment listed in Table 2A or 2B. In some embodiments, the antibody or antigen-binding fragment thereof that specifically binds ST2 comprises an IgG1 heavy chain fragment having at least 95% sequence identity to an IgG1 heavy chain fragment listed in Table 2A or 2B. In some embodiments, the antibody or antigen-binding fragment thereof that specifically binds ST2 comprises an IgG1 heavy chain fragment having at least 96% sequence identity to an IgG1 heavy chain fragment listed in Table 2A or 2B. In some embodiments, the antibody or antigen-binding fragment thereof that specifically binds ST2 comprises an IgG1 heavy chain fragment having at least 97% sequence identity to an IgG1 heavy chain fragment listed in Table 2A or 2B. In some embodiments, the antibody or antigen-binding fragment thereof that specifically binds ST2 comprises an IgG1 heavy chain fragment having at least 98% sequence identity to an IgG1 heavy chain fragment listed in Table 2A or 2B. In some embodiments, the antibody or antigen-binding fragment thereof that specifically binds ST2 comprises an IgG1 heavy chain fragment having at least 99% sequence identity to an IgG1 heavy chain fragment listed in Table 2A or 2B.

[0103] In some embodiments, the antibody or antigen-binding fragment thereof that specifically binds ST2 comprises or consists of an IgG1 light chain variable region listed in Table 2C. In some embodiments, the antibody or antigen-binding fragment thereof that specifically binds ST2 comprises or consists of a heavy chain variable region listed in Table 2B and the corresponding light chain variable region from the same antibody listed in Table 2C. For example, in some embodiments, the antibody or antigen-binding fragment thereof that specifically binds ST2 comprises or consists of the heavy chain variable region of Antibody 1 (i.e. amino acids 1-147 of SEQ ID NO: 23) and the light chain variable region of Antibody 1 (i.e. amino acids 1-132 of SEQ ID NO: 241). In some embodiments, the antibody or antigen-binding fragment thereof that specifically binds ST2 comprises or consists of a heavy chain fragment (heavy chain variable region +C_{H}1) listed in Table 2A and the corresponding light chain from the same antibody listed in Table 2C. For example, in some embodiments, the antibody or antigen-binding fragment thereof that specifically binds ST2 comprises or consists of amino acids 1-251 of SEQ ID NO: 23 (Antibody 1) and the light chain of Antibody 1 (i.e. SEQ ID NO: 24).

[0104] In some embodiments, the antibody or antigen-binding fragment thereof that specifically binds ST2 comprises an IgG1 light chain variable region having at least 85% sequence identity to an IgG1 light chain variable region listed in Table 2C. In some embodiments, the antibody or antigen-binding fragment thereof that specifically binds ST2 comprises an IgG1 light chain variable region having at least 90% sequence identity to an IgG1 light chain variable region listed in Table 2C. In some embodiments, the antibody or antigen-binding fragment thereof that specifically binds ST2 comprises an IgG1 light chain variable region having at least 95% sequence identity to an IgG1 light chain variable region listed in Table 2C. In some embodiments, the antibody or antigen-binding fragment thereof that specifically binds ST2 comprises an IgG1 light chain variable region having at least 96% sequence identity to an IgG1 light chain variable region listed in Table 2C. In some embodiments, the antibody or antigen-binding fragment thereof that specifically binds ST2 comprises an IgG1 light chain variable region having at least 97% sequence identity to an IgG1 light chain variable region listed in Table 2C. In some embodiments, the antibody or antigen-binding fragment thereof that specifically binds ST2 comprises an IgG1 light chain variable region having at least 98% sequence identity to an IgG1 light chain variable region listed in Table 2C. In some embodiments, the antibody or antigen-binding fragment thereof that specifically binds ST2 comprises an IgG1 light chain variable region having at least 99% sequence identity to an IgG1 light chain variable region listed in Table 2C.

TABLE 2A
ST2 antibody IgG1 heavy chain fragments. Each fragment consists
of the heavy chain variable region and the heavy chain constant region
C_{H}1. The fragments do not contain the Fc region. The amino acid
numbers refer to the amino acid positions in the listed sequence.
For example, the IgG1 heavy chain fragment of Antibody 1 consists
of amino acid positions 25-251 of SEQ ID NO: 23.

| Human | IgG1 Heavy | Amino Acids in |
|---|---|---|
| ST2 IgG1 | Chain Amino | IgG1 Heavy Chain |
| Antibody | Acid Sequence | Fragment |
| 1 | SEQ ID NO: 23 | 25-251 |
| 2 | SEQ ID NO: 25 | 25-250 |
| 3 | SEQ ID NO: 27 | 25-249 |
| 4 | SEQ ID NO: 29 | 25-252 |
| 5 | SEQ ID NO: 31 | 25-245 |
| 6 | SEQ ID NO: 33 | 25-247 |
| 7 | SEQ ID NO: 35 | 25-254 |
| 8 | SEQ ID NO: 37 | 25-252 |
| 9 | SEQ ID NO: 39 | 25-250 |
| 10 | SEQ ID NO: 41 | 25-249 |
| 11 | SEQ ID NO: 43 | 25-248 |
| 12 | SEQ ID NO: 45 | 25-255 |
| 13 | SEQ ID NO: 47 | 25-245 |
| 14 | SEQ ID NO: 49 | 25-244 |
| 15 | SEQ ID NO: 51 | 25-249 |
| 16 | SEQ ID NO: 53 | 25-256 |
| 17 | SEQ ID NO: 55 | 25-246 |
| 18 | SEQ ID NO: 57 | 25-251 |
| 19 | SEQ ID NO: 59 | 25-245 |
| 20 | SEQ ID NO: 61 | 25-252 |
| 21 | SEQ ID NO: 63 | 25-246 |
| 22 | SEQ ID NO: 65 | 25-249 |
| 23 | SEQ ID NO: 67 | 25-244 |
| 24 | SEQ ID NO: 69 | 25-249 |
| 25 | SEQ ID NO: 71 | 25-244 |
| 26 | SEQ ID NO: 73 | 25-244 |
| 27 | SEQ ID NO: 75 | 25-249 |
| 28 | SEQ ID NO: 77 | 25-247 |
| 29 | SEQ ID NO: 79 | 25-247 |
| 30 | SEQ ID NO: 81 | 25-255 |
| 31 | SEQ ID NO: 83 | 25-246 |
| 32 | SEQ ID NO: 85 | 25-248 |
| 33 | SEQ ID NO: 87 | 25-252 |
| 34 | SEQ ID NO: 89 | 25-248 |
| 35 | SEQ ID NO: 91 | 25-244 |
| 36 | SEQ ID NO: 93 | 25-247 |
| 37 | SEQ ID NO: 95 | 25-254 |
| 38 | SEQ ID NO: 97 | 25-251 |
| 39 | SEQ ID NO: 99 | 25-245 |
| 40 | SEQ ID NO: 101 | 25-257 |
| 41 | SEQ ID NO: 103 | 25-256 |
| 42 | SEQ ID NO: 105 | 25-249 |
| 43 | SEQ ID NO: 107 | 25-248 |
| 44 | SEQ ID NO: 109 | 25-250 |
| 45 | SEQ ID NO: 111 | 25-244 |
| 46 | SEQ ID NO: 113 | 25-247 |
| 47 | SEQ ID NO: 115 | 25-248 |
| 48 | SEQ ID NO: 117 | 25-245 |
| 49 | SEQ ID NO: 119 | 25-253 |
| 50 | SEQ ID NO: 121 | 25-249 |
| 51 | SEQ ID NO: 123 | 25-253 |
| 52 | SEQ ID NO: 125 | 25-253 |
| 53 | SEQ ID NO: 127 | 25-251 |
| 54 | SEQ ID NO: 129 | 25-245 |
| 55 | SEQ ID NO: 131 | 25-249 |
| 56 | SEQ ID NO: 133 | 25-250 |
| 57 | SEQ ID NO: 135 | 25-256 |
| 58 | SEQ ID NO: 137 | 25-250 |
| 59 | SEQ ID NO: 139 | 25-247 |
| 60 | SEQ ID NO: 141 | 25-253 |
| 61 | SEQ ID NO: 143 | 25-249 |
| 62 | SEQ ID NO: 145 | 25-246 |
| 63 | SEQ ID NO: 147 | 25-251 |
| 64 | SEQ ID NO: 149 | 25-245 |
| 65 | SEQ ID NO: 151 | 25-244 |
| 66 | SEQ ID NO: 153 | 25-249 |
| 67 | SEQ ID NO: 155 | 25-257 |
| 68 | SEQ ID NO: 157 | 25-250 |
| 69 | SEQ ID NO: 159 | 25-253 |
| 70 | SEQ ID NO: 161 | 25-245 |
| 71 | SEQ ID NO: 163 | 25-260 |
| 72 | SEQ ID NO: 165 | 25-245 |
| 73 | SEQ ID NO: 167 | 25-244 |
| 74 | SEQ ID NO: 169 | 25-244 |
| 75 | SEQ ID NO: 171 | 25-245 |
| 76 | SEQ ID NO: 173 | 25-244 |
| 77 | SEQ ID NO: 175 | 25-248 |
| 78 | SEQ ID NO: 177 | 25-246 |
| 79 | SEQ ID NO: 179 | 25-249 |
| 80 | SEQ ID NO: 181 | 25-249 |
| 81 | SEQ ID NO: 183 | 25-247 |
| 82 | SEQ ID NO: 185 | 25-251 |
| 83 | SEQ ID NO: 187 | 25-247 |
| 84 | SEQ ID NO: 189 | 25-249 |
| 85 | SEQ ID NO: 191 | 25-248 |
| 86 | SEQ ID NO: 193 | 25-246 |
| 87 | SEQ ID NO: 195 | 25-250 |
| 88 | SEQ ID NO: 197 | 25-245 |
| 89 | SEQ ID NO: 199 | 25-250 |
| 90 | SEQ ID NO: 201 | 25-246 |
| 91 | SEQ ID NO: 203 | 25-243 |
| 92 | SEQ ID NO: 205 | 25-248 |
| 93 | SEQ ID NO: 207 | 25-250 |
| 94 | SEQ ID NO: 209 | 25-249 |
| 95 | SEQ ID NO: 211 | 25-255 |
| 96 | SEQ ID NO: 213 | 25-245 |
| 97 | SEQ ID NO: 215 | 25-244 |
| 98 | SEQ ID NO: 217 | 25-250 |
| 99 | SEQ ID NO: 219 | 25-246 |
| 100 | SEQ ID NO: 221 | 25-247 |
| 101 | SEQ ID NO: 223 | 25-254 |
| 102 | SEQ ID NO: 225 | 25-248 |
| 103 | SEQ ID NO: 227 | 25-249 |
| 104 | SEQ ID NO: 229 | 25-253 |
| 105 | SEQ ID NO: 231 | 25-251 |
| 106 | SEQ ID NO: 233 | 25-244 |
| 107 | SEQ ID NO: 235 | 25-245 |
| 108 | SEQ ID NO: 237 | 25-244 |
| 109 | SEQ ID NO: 239 | 25-254 |

TABLE 2B
ST2 antibody IgG1 heavy chain variable regions. The amino acid
numbers refer to the amino acid positions in the listed sequence.
For example, the IgG1 heavy chain variable region of Antibody
1 consists of amino acid positions 25-147 of SEQ ID NO: 23.

| Human | IgG1 Heavy | Amino Acids in |
|---|---|---|
| ST2 IgG1 | Chain Amino | IgG1 Heavy Chain |
| Antibody | Acid Sequence | Variable Region |
| 1 | SEQ ID NO: 23 | 25-147 |
| 2 | SEQ ID NO: 25 | 25-147 |
| 3 | SEQ ID NO: 27 | 25-145 |
| 4 | SEQ ID NO: 29 | 25-148 |
| 5 | SEQ ID NO: 31 | 25-141 |
| 6 | SEQ ID NO: 33 | 25-143 |
| 7 | SEQ ID NO: 35 | 25-150 |
| 8 | SEQ ID NO: 37 | 25-148 |
| 9 | SEQ ID NO: 39 | 25-146 |
| 10 | SEQ ID NO: 41 | 25-145 |
| 11 | SEQ ID NO: 43 | 25-143 |
| 12 | SEQ ID NO: 45 | 25-151 |
| 13 | SEQ ID NO: 47 | 25-141 |
| 14 | SEQ ID NO: 49 | 25-140 |
| 15 | SEQ ID NO: 51 | 25-145 |
| 16 | SEQ ID NO: 53 | 25-152 |
| 17 | SEQ ID NO: 55 | 25-142 |
| 18 | SEQ ID NO: 57 | 25-147 |
| 19 | SEQ ID NO: 59 | 25-141 |
| 20 | SEQ ID NO: 61 | 25-148 |
| 21 | SEQ ID NO: 63 | 25-142 |
| 22 | SEQ ID NO: 65 | 25-145 |
| 23 | SEQ ID NO: 67 | 25-140 |
| 24 | SEQ ID NO: 69 | 25-145 |
| 25 | SEQ ID NO: 71 | 25-140 |
| 26 | SEQ ID NO: 73 | 25-140 |
| 27 | SEQ ID NO: 75 | 25-145 |
| 28 | SEQ ID NO: 77 | 25-143 |
| 29 | SEQ ID NO: 79 | 25-143 |
| 30 | SEQ ID NO: 81 | 25-151 |
| 31 | SEQ ID NO: 83 | 25-142 |
| 32 | SEQ ID NO: 85 | 25-144 |
| 33 | SEQ ID NO: 87 | 25-148 |
| 34 | SEQ ID NO: 89 | 25-144 |
| 35 | SEQ ID NO: 91 | 25-140 |
| 36 | SEQ ID NO: 93 | 25-143 |
| 37 | SEQ ID NO: 95 | 25-150 |
| 38 | SEQ ID NO: 97 | 25-147 |
| 39 | SEQ ID NO: 99 | 25-141 |
| 40 | SEQ ID NO: 101 | 25-153 |
| 41 | SEQ ID NO: 103 | 25-152 |
| 42 | SEQ ID NO: 105 | 25-145 |
| 43 | SEQ ID NO: 107 | 25-144 |
| 44 | SEQ ID NO: 109 | 25-146 |
| 45 | SEQ ID NO: 111 | 25-140 |
| 46 | SEQ ID NO: 113 | 25-143 |
| 47 | SEQ ID NO: 115 | 25-144 |
| 48 | SEQ ID NO: 117 | 25-141 |
| 49 | SEQ ID NO: 119 | 25-149 |
| 50 | SEQ ID NO: 121 | 25-145 |
| 51 | SEQ ID NO: 123 | 25-149 |
| 52 | SEQ ID NO: 125 | 25-149 |
| 53 | SEQ ID NO: 127 | 25-147 |
| 54 | SEQ ID NO: 129 | 25-147 |
| 55 | SEQ ID NO: 131 | 25-145 |
| 56 | SEQ ID NO: 133 | 25-146 |
| 57 | SEQ ID NO: 135 | 25-152 |
| 58 | SEQ ID NO: 137 | 25-146 |
| 59 | SEQ ID NO: 139 | 25-149 |
| 60 | SEQ ID NO: 141 | 25-149 |
| 61 | SEQ ID NO: 143 | 25-145 |
| 62 | SEQ ID NO: 145 | 25-142 |
| 63 | SEQ ID NO: 147 | 25-147 |
| 64 | SEQ ID NO: 149 | 25-141 |
| 65 | SEQ ID NO: 151 | 25-140 |
| 66 | SEQ ID NO: 153 | 25-145 |
| 67 | SEQ ID NO: 155 | 25-153 |
| 68 | SEQ ID NO: 157 | 25-146 |
| 69 | SEQ ID NO: 159 | 25-149 |
| 70 | SEQ ID NO: 161 | 25-141 |
| 71 | SEQ ID NO: 163 | 25-156 |
| 72 | SEQ ID NO: 165 | 25-141 |
| 73 | SEQ ID NO: 167 | 25-140 |
| 74 | SEQ ID NO: 169 | 25-140 |
| 75 | SEQ ID NO: 171 | 25-141 |
| 76 | SEQ ID NO: 173 | 25-140 |
| 77 | SEQ ID NO: 175 | 25-144 |
| 78 | SEQ ID NO: 177 | 25-142 |
| 79 | SEQ ID NO: 179 | 25-145 |
| 80 | SEQ ID NO: 181 | 25-145 |
| 81 | SEQ ID NO: 183 | 25-143 |
| 82 | SEQ ID NO: 185 | 25-147 |
| 83 | SEQ ID NO: 187 | 25-143 |
| 84 | SEQ ID NO: 189 | 25-145 |
| 85 | SEQ ID NO: 191 | 25-144 |
| 86 | SEQ ID NO: 193 | 25-143 |
| 87 | SEQ ID NO: 195 | 25-146 |
| 88 | SEQ ID NO: 197 | 25-141 |
| 89 | SEQ ID NO: 199 | 25-146 |
| 90 | SEQ ID NO: 201 | 25-142 |
| 91 | SEQ ID NO: 203 | 25-139 |
| 92 | SEQ ID NO: 205 | 25-144 |
| 93 | SEQ ID NO: 207 | 25-146 |
| 94 | SEQ ID NO: 209 | 25-142 |
| 95 | SEQ ID NO: 211 | 25-151 |
| 96 | SEQ ID NO: 213 | 25-141 |
| 97 | SEQ ID NO: 215 | 25-140 |
| 98 | SEQ ID NO: 217 | 25-146 |
| 99 | SEQ ID NO: 219 | 25-142 |
| 100 | SEQ ID NO: 221 | 25-143 |
| 101 | SEQ ID NO: 223 | 25-150 |
| 102 | SEQ ID NO: 225 | 25-144 |
| 103 | SEQ ID NO: 227 | 25-145 |
| 104 | SEQ ID NO: 229 | 25-149 |
| 105 | SEQ ID NO: 231 | 25-147 |
| 106 | SEQ ID NO: 233 | 25-140 |
| 107 | SEQ ID NO: 235 | 25-141 |
| 108 | SEQ ID NO: 237 | 25-140 |
| 109 | SEQ ID NO: 239 | 25-150 |

TABLE 2C
ST2 antibody IgG1 light chain variable regions. The amino acid
numbers refer to the amino acid positions in the listed sequence.
For example, the IgG1 light chain variable region of Antibody
1 consists of amino acid positions 21-132 of SEQ ID NO: 241.

| Human | IgG1 Light | Amino Acids in |
|---|---|---|
| ST2 IgG1 | Chain Amino | IgG1 Light Chain |
| Antibody | Acid Sequence | Variable Region |
| 1 | SEQ ID NO: 241 | 21-132 |
| 2 | SEQ ID NO: 243 | 21-132 |
| 3 | SEQ ID NO: 245 | 21-128 |
| 4 | SEQ ID NO: 247 | 21-127 |
| 5 | SEQ ID NO: 249 | 21-127 |
| 6 | SEQ ID NO: 251 | 21-127 |
| 7 | SEQ ID NO: 253 | 21-131 |
| 8 | SEQ ID NO: 255 | 21-132 |
| 9 | SEQ ID NO: 257 | 21-127 |
| 10 | SEQ ID NO: 259 | 21-132 |
| 11 | SEQ ID NO: 261 | 21-127 |
| 12 | SEQ ID NO: 263 | 21-127 |
| 13 | SEQ ID NO: 265 | 21-132 |
| 14 | SEQ ID NO: 267 | 21-132 |
| 15 | SEQ ID NO: 269 | 21-127 |
| 16 | SEQ ID NO: 271 | 21-127 |
| 17 | SEQ ID NO: 273 | 21-127 |
| 18 | SEQ ID NO: 275 | 21-127 |
| 19 | SEQ ID NO: 277 | 21-127 |
| 20 | SEQ ID NO: 279 | 21-127 |
| 21 | SEQ ID NO: 281 | 21-127 |
| 22 | SEQ ID NO: 283 | 21-127 |
| 23 | SEQ ID NO: 285 | 21-127 |
| 24 | SEQ ID NO: 287 | 21-132 |
| 25 | SEQ ID NO: 289 | 21-127 |
| 26 | SEQ ID NO: 291 | 21-133 |
| 27 | SEQ ID NO: 293 | 21-127 |
| 28 | SEQ ID NO: 295 | 21-132 |
| 29 | SEQ ID NO: 297 | 21-127 |
| 30 | SEQ ID NO: 299 | 21-132 |
| 31 | SEQ ID NO: 301 | 21-127 |
| 32 | SEQ ID NO: 303 | 21-127 |
| 33 | SEQ ID NO: 305 | 21-132 |
| 34 | SEQ ID NO: 307 | 21-127 |
| 35 | SEQ ID NO: 309 | 21-127 |
| 36 | SEQ ID NO: 311 | 21-127 |
| 37 | SEQ ID NO: 313 | 21-127 |
| 38 | SEQ ID NO: 315 | 21-128 |
| 39 | SEQ ID NO: 317 | 21-132 |
| 40 | SEQ ID NO: 319 | 21-127 |
| 41 | SEQ ID NO: 321 | 21-133 |
| 42 | SEQ ID NO: 323 | 21-127 |
| 43 | SEQ ID NO: 325 | 21-127 |
| 44 | SEQ ID NO: 327 | 21-127 |
| 45 | SEQ ID NO: 329 | 21-127 |
| 46 | SEQ ID NO: 331 | 21-127 |
| 47 | SEQ ID NO: 333 | 21-127 |
| 48 | SEQ ID NO: 335 | 21-127 |
| 49 | SEQ ID NO: 337 | 21-127 |
| 50 | SEQ ID NO: 339 | 21-127 |
| 51 | SEQ ID NO: 341 | 21-128 |
| 52 | SEQ ID NO: 343 | 21-131 |
| 53 | SEQ ID NO: 345 | 21-127 |
| 54 | SEQ ID NO: 347 | 21-131 |
| 55 | SEQ ID NO: 349 | 21-132 |
| 56 | SEQ ID NO: 351 | 21-127 |
| 57 | SEQ ID NO: 353 | 21-127 |
| 58 | SEQ ID NO: 355 | 21-127 |
| 59 | SEQ ID NO: 357 | 21-127 |
| 60 | SEQ ID NO: 359 | 21-127 |
| 61 | SEQ ID NO: 361 | 21-132 |
| 62 | SEQ ID NO: 363 | 21-133 |
| 63 | SEQ ID NO: 365 | 21-132 |
| 64 | SEQ ID NO: 367 | 21-126 |
| 65 | SEQ ID NO: 369 | 21-127 |
| 66 | SEQ ID NO: 371 | 21-132 |
| 67 | SEQ ID NO: 373 | 21-127 |
| 68 | SEQ ID NO: 375 | 21-132 |
| 69 | SEQ ID NO: 377 | 21-132 |
| 70 | SEQ ID NO: 379 | 21-128 |
| 71 | SEQ ID NO: 381 | 21-127 |
| 72 | SEQ ID NO: 383 | 21-127 |
| 73 | SEQ ID NO: 385 | 21-127 |
| 74 | SEQ ID NO: 387 | 21-127 |
| 75 | SEQ ID NO: 389 | 21-127 |
| 76 | SEQ ID NO: 391 | 21-127 |
| 77 | SEQ ID NO: 393 | 21-133 |
| 78 | SEQ ID NO: 395 | 21-127 |
| 79 | SEQ ID NO: 397 | 21-127 |
| 80 | SEQ ID NO: 399 | 21-132 |
| 81 | SEQ ID NO: 401 | 21-127 |
| 82 | SEQ ID NO: 403 | 21-127 |
| 83 | SEQ ID NO: 405 | 21-127 |
| 84 | SEQ ID NO: 407 | 21-132 |
| 85 | SEQ ID NO: 409 | 21-127 |
| 86 | SEQ ID NO: 411 | 21-127 |
| 87 | SEQ ID NO: 413 | 21-127 |
| 88 | SEQ ID NO: 415 | 21-127 |
| 89 | SEQ ID NO: 417 | 21-127 |
| 90 | SEQ ID NO: 419 | 21-132 |
| 91 | SEQ ID NO: 421 | 21-127 |
| 92 | SEQ ID NO: 423 | 21-133 |
| 93 | SEQ ID NO: 425 | 21-132 |
| 94 | SEQ ID NO: 427 | 21-128 |
| 95 | SEQ ID NO: 429 | 21-132 |
| 96 | SEQ ID NO: 431 | 21-132 |
| 97 | SEQ ID NO: 433 | 21-127 |
| 98 | SEQ ID NO: 435 | 21-127 |
| 99 | SEQ ID NO: 437 | 21-127 |
| 100 | SEQ ID NO: 439 | 21-127 |
| 101 | SEQ ID NO: 441 | 21-126 |
| 102 | SEQ ID NO: 443 | 21-132 |
| 103 | SEQ ID NO: 445 | 21-127 |
| 104 | SEQ ID NO: 447 | 21-127 |
| 105 | SEQ ID NO: 449 | 21-127 |
| 106 | SEQ ID NO: 451 | 21-128 |
| 107 | SEQ ID NO: 453 | 21-127 |
| 108 | SEQ ID NO: 455 | 21-127 |
| 109 | SEQ ID NO: 457 | 21-133 |

[0105] In certain aspects, the disclosure relates to a recombinant antibody or an antigen-binding fragment thereof that specifically binds ST2, wherein the antibody, or antigen-binding fragment thereof, comprises six complementarity determining regions (CDRs): CDRH1, CDRH2, CDRH3, CDRL1, CDRL2, and CDRL3, wherein CDRH1 comprises an amino acid sequence that has at least 85%, 90%, 95%, 96%, 97%, 98%, or 99% sequence identity to a CDRH1 amino acid sequence as set forth in a heavy chain variable domain amino acid sequence selected from the group consisting of:

amino acids 25-147 of SEQ ID NO: 23, amino acids 25-147 of SEQ ID NO: 25,
amino acids 25-145 of SEQ ID NO: 27, amino acids 25-148 of SEQ ID NO: 29,
amino acids 25-141 of SEQ ID NO: 31, amino acids 25-143 of SEQ ID NO: 33,
amino acids 25-150 of SEQ ID NO: 35, amino acids 25-148 of SEQ ID NO: 37,
amino acids 25-146 of SEQ ID NO: 39, amino acids 25-145 of SEQ ID NO: 41,
amino acids 25-143 of SEQ ID NO: 43, amino acids 25-151 of SEQ ID NO: 45,
amino acids 25-141 of SEQ ID NO: 47, amino acids 25-140 of SEQ ID NO: 49,
amino acids 25-145 of SEQ ID NO: 51, amino acids 25-152 of SEQ ID NO: 53,
amino acids 25-142 of SEQ ID NO: 55, amino acids 25-147 of SEQ ID NO: 57,
amino acids 25-141 of SEQ ID NO: 59, amino acids 25-148 of SEQ ID NO: 61,
amino acids 25-142 of SEQ ID NO: 63, amino acids 25-145 of SEQ ID NO: 65,
amino acids 25-140 of SEQ ID NO: 67, amino acids 25-145 of SEQ ID NO: 69,
amino acids 25-140 of SEQ ID NO: 71, amino acids 25-140 of SEQ ID NO: 73,
amino acids 25-145 of SEQ ID NO: 75, amino acids 25-143 of SEQ ID NO: 77,
amino acids 25-143 of SEQ ID NO: 79, amino acids 25-151 of SEQ ID NO: 81,
amino acids 25-142 of SEQ ID NO: 83, amino acids 25-144 of SEQ ID NO: 85,
amino acids 25-148 of SEQ ID NO: 87, amino acids 25-144 of SEQ ID NO: 89,
amino acids 25-140 of SEQ ID NO: 91, amino acids 25-143 of SEQ ID NO: 93,
amino acids 25-150 of SEQ ID NO: 95, amino acids 25-147 of SEQ ID NO: 97,
amino acids 25-141 of SEQ ID NO: 99, amino acids 25-153 of SEQ ID NO: 101,
amino acids 25-152 of SEQ ID NO: 103, amino acids 25-145 of SEQ ID NO: 105,
amino acids 25-144 of SEQ ID NO: 107, amino acids 25-146 of SEQ ID NO: 109,
amino acids 25-140 of SEQ ID NO: 111, amino acids 25-143 of SEQ ID NO: 113,
amino acids 25-144 of SEQ ID NO: 115, amino acids 25-141 of SEQ ID NO: 117,
amino acids 25-149 of SEQ ID NO: 119, amino acids 25-145 of SEQ ID NO: 121,
amino acids 25-149 of SEQ ID NO: 123, amino acids 25-149 of SEQ ID NO: 125,
amino acids 25-147 of SEQ ID NO: 127, amino acids 25-147 of SEQ ID NO: 129,
amino acids 25-145 of SEQ ID NO: 131, amino acids 25-146 of SEQ ID NO: 133,
amino acids 25-152 of SEQ ID NO: 135, amino acids 25-146 of SEQ ID NO: 137,
amino acids 25-149 of SEQ ID NO: 139, amino acids 25-149 of SEQ ID NO: 141,
amino acids 25-145 of SEQ ID NO: 143, amino acids 25-142 of SEQ ID NO: 145,
amino acids 25-147 of SEQ ID NO: 147, amino acids 25-141 of SEQ ID NO: 149,
amino acids 25-140 of SEQ ID NO: 151, amino acids 25-145 of SEQ ID NO: 153,
amino acids 25-153 of SEQ ID NO: 155, amino acids 25-146 of SEQ ID NO: 157,
amino acids 25-149 of SEQ ID NO: 159, amino acids 25-141 of SEQ ID NO: 161,
amino acids 25-156 of SEQ ID NO: 163, amino acids 25-141 of SEQ ID NO: 165,
amino acids 25-140 of SEQ ID NO: 167, amino acids 25-140 of SEQ ID NO: 169,
amino acids 25-141 of SEQ ID NO: 171, amino acids 25-140 of SEQ ID NO: 173,
amino acids 25-144 of SEQ ID NO: 175, amino acids 25-142 of SEQ ID NO: 177,
amino acids 25-145 of SEQ ID NO: 179, amino acids 25-145 of SEQ ID NO: 181,
amino acids 25-143 of SEQ ID NO: 183, amino acids 25-147 of SEQ ID NO: 185,
amino acids 25-143 of SEQ ID NO: 187, amino acids 25-145 of SEQ ID NO: 189,
amino acids 25-144 of SEQ ID NO: 191, amino acids 25-143 of SEQ ID NO: 193,
amino acids 25-146 of SEQ ID NO: 195, amino acids 25-141 of SEQ ID NO: 197,
amino acids 25-146 of SEQ ID NO: 199, amino acids 25-142 of SEQ ID NO: 201,
amino acids 25-139 of SEQ ID NO: 203, amino acids 25-144 of SEQ ID NO: 205,
amino acids 25-146 of SEQ ID NO: 207, amino acids 25-142 of SEQ ID NO: 209,
amino acids 25-151 of SEQ ID NO: 211, amino acids 25-141 of SEQ ID NO: 213,
amino acids 25-140 of SEQ ID NO: 215, amino acids 25-146 of SEQ ID NO: 217,
amino acids 25-142 of SEQ ID NO: 219, amino acids 25-143 of SEQ ID NO: 221,
amino acids 25-150 of SEQ ID NO: 223, amino acids 25-144 of SEQ ID NO: 225,
amino acids 25-145 of SEQ ID NO: 227, amino acids 25-149 of SEQ ID NO: 229,
amino acids 25-147 of SEQ ID NO: 231, amino acids 25-140 of SEQ ID NO: 233,
amino acids 25-141 of SEQ ID NO: 235, amino acids 25-140 of SEQ ID NO: 237, and
amino acids 25-150 of SEQ ID NO: 239,
wherein CDRH2 comprises an amino acid sequence that has at least 85%, 90%, 95%, 96%, 97%, 98%, or 99% sequence identity to a CDRH2 amino acid sequence as set forth in a heavy chain variable domain amino acid sequence selected from the group consisting of:
amino acids 25-147 of SEQ ID NO: 23, amino acids 25-147 of SEQ ID NO: 25,
amino acids 25-145 of SEQ ID NO: 27, amino acids 25-148 of SEQ ID NO: 29,
amino acids 25-141 of SEQ ID NO: 31, amino acids 25-143 of SEQ ID NO: 33,
amino acids 25-150 of SEQ ID NO: 35, amino acids 25-148 of SEQ ID NO: 37,
amino acids 25-146 of SEQ ID NO: 39, amino acids 25-145 of SEQ ID NO: 41,
amino acids 25-143 of SEQ ID NO: 43, amino acids 25-151 of SEQ ID NO: 45,
amino acids 25-141 of SEQ ID NO: 47, amino acids 25-140 of SEQ ID NO: 49,
amino acids 25-145 of SEQ ID NO: 51, amino acids 25-152 of SEQ ID NO: 53,
amino acids 25-142 of SEQ ID NO: 55, amino acids 25-147 of SEQ ID NO: 57,
amino acids 25-141 of SEQ ID NO: 59, amino acids 25-148 of SEQ ID NO: 61,
amino acids 25-142 of SEQ ID NO: 63, amino acids 25-145 of SEQ ID NO: 65,
amino acids 25-140 of SEQ ID NO: 67, amino acids 25-145 of SEQ ID NO: 69,
amino acids 25-140 of SEQ ID NO: 71, amino acids 25-140 of SEQ ID NO: 73,
amino acids 25-145 of SEQ ID NO: 75, amino acids 25-143 of SEQ ID NO: 77,
amino acids 25-143 of SEQ ID NO: 79, amino acids 25-151 of SEQ ID NO: 81,
amino acids 25-142 of SEQ ID NO: 83, amino acids 25-144 of SEQ ID NO: 85,
amino acids 25-148 of SEQ ID NO: 87, amino acids 25-144 of SEQ ID NO: 89,
amino acids 25-140 of SEQ ID NO: 91, amino acids 25-143 of SEQ ID NO: 93,
amino acids 25-150 of SEQ ID NO: 95, amino acids 25-147 of SEQ ID NO: 97,
amino acids 25-141 of SEQ ID NO: 99, amino acids 25-153 of SEQ ID NO: 101,
amino acids 25-152 of SEQ ID NO: 103, amino acids 25-145 of SEQ ID NO: 105,
amino acids 25-144 of SEQ ID NO: 107, amino acids 25-146 of SEQ ID NO: 109,
amino acids 25-140 of SEQ ID NO: 111, amino acids 25-143 of SEQ ID NO: 113,
amino acids 25-144 of SEQ ID NO: 115, amino acids 25-141 of SEQ ID NO: 117,
amino acids 25-149 of SEQ ID NO: 119, amino acids 25-145 of SEQ ID NO: 121,
amino acids 25-149 of SEQ ID NO: 123, amino acids 25-149 of SEQ ID NO: 125,
amino acids 25-147 of SEQ ID NO: 127, amino acids 25-147 of SEQ ID NO: 129,
amino acids 25-145 of SEQ ID NO: 131, amino acids 25-146 of SEQ ID NO: 133,
amino acids 25-152 of SEQ ID NO: 135, amino acids 25-146 of SEQ ID NO: 137,
amino acids 25-149 of SEQ ID NO: 139, amino acids 25-149 of SEQ ID NO: 141,
amino acids 25-145 of SEQ ID NO: 143, amino acids 25-142 of SEQ ID NO: 145,
amino acids 25-147 of SEQ ID NO: 147, amino acids 25-141 of SEQ ID NO: 149,
amino acids 25-140 of SEQ ID NO: 151, amino acids 25-145 of SEQ ID NO: 153,
amino acids 25-153 of SEQ ID NO: 155, amino acids 25-146 of SEQ ID NO: 157,
amino acids 25-149 of SEQ ID NO: 159, amino acids 25-141 of SEQ ID NO: 161,
amino acids 25-156 of SEQ ID NO: 163, amino acids 25-141 of SEQ ID NO: 165,
amino acids 25-140 of SEQ ID NO: 167, amino acids 25-140 of SEQ ID NO: 169,
amino acids 25-141 of SEQ ID NO: 171, amino acids 25-140 of SEQ ID NO: 173,
amino acids 25-144 of SEQ ID NO: 175, amino acids 25-142 of SEQ ID NO: 177,
amino acids 25-145 of SEQ ID NO: 179, amino acids 25-145 of SEQ ID NO: 181,
amino acids 25-143 of SEQ ID NO: 183, amino acids 25-147 of SEQ ID NO: 185,
amino acids 25-143 of SEQ ID NO: 187, amino acids 25-145 of SEQ ID NO: 189,
amino acids 25-144 of SEQ ID NO: 191, amino acids 25-143 of SEQ ID NO: 193,
amino acids 25-146 of SEQ ID NO: 195, amino acids 25-141 of SEQ ID NO: 197,
amino acids 25-146 of SEQ ID NO: 199, amino acids 25-142 of SEQ ID NO: 201,
amino acids 25-139 of SEQ ID NO: 203, amino acids 25-144 of SEQ ID NO: 205,
amino acids 25-146 of SEQ ID NO: 207, amino acids 25-142 of SEQ ID NO: 209,
amino acids 25-151 of SEQ ID NO: 211, amino acids 25-141 of SEQ ID NO: 213,
amino acids 25-140 of SEQ ID NO: 215, amino acids 25-146 of SEQ ID NO: 217,
amino acids 25-142 of SEQ ID NO: 219, amino acids 25-143 of SEQ ID NO: 221,
amino acids 25-150 of SEQ ID NO: 223, amino acids 25-144 of SEQ ID NO: 225,
amino acids 25-145 of SEQ ID NO: 227, amino acids 25-149 of SEQ ID NO: 229,
amino acids 25-147 of SEQ ID NO: 231, amino acids 25-140 of SEQ ID NO: 233,
amino acids 25-141 of SEQ ID NO: 235, amino acids 25-140 of SEQ ID NO: 237, and
amino acids 25-150 of SEQ ID NO: 239,
wherein CDRH3 comprises an amino acid sequence that has at least 85%, 90%, 95%, 96%, 97%, 98% or 99% sequence identity to a CDRH3 amino acid sequence as set forth in a heavy chain variable domain amino acid sequence selected from the group consisting of:
amino acids 25-147 of SEQ ID NO: 23, amino acids 25-147 of SEQ ID NO: 25,
amino acids 25-145 of SEQ ID NO: 27, amino acids 25-148 of SEQ ID NO: 29,
amino acids 25-141 of SEQ ID NO: 31, amino acids 25-143 of SEQ ID NO: 33,
amino acids 25-150 of SEQ ID NO: 35, amino acids 25-148 of SEQ ID NO: 37,
amino acids 25-146 of SEQ ID NO: 39, amino acids 25-145 of SEQ ID NO: 41,
amino acids 25-143 of SEQ ID NO: 43, amino acids 25-151 of SEQ ID NO: 45,
amino acids 25-141 of SEQ ID NO: 47, amino acids 25-140 of SEQ ID NO: 49,
amino acids 25-145 of SEQ ID NO: 51, amino acids 25-152 of SEQ ID NO: 53,
amino acids 25-142 of SEQ ID NO: 55, amino acids 25-147 of SEQ ID NO: 57,
amino acids 25-141 of SEQ ID NO: 59, amino acids 25-148 of SEQ ID NO: 61,
amino acids 25-142 of SEQ ID NO: 63, amino acids 25-145 of SEQ ID NO: 65,
amino acids 25-140 of SEQ ID NO: 67, amino acids 25-145 of SEQ ID NO: 69,
amino acids 25-140 of SEQ ID NO: 71, amino acids 25-140 of SEQ ID NO: 73,
amino acids 25-145 of SEQ ID NO: 75, amino acids 25-143 of SEQ ID NO: 77,
amino acids 25-143 of SEQ ID NO: 79, amino acids 25-151 of SEQ ID NO: 81,
amino acids 25-142 of SEQ ID NO: 83, amino acids 25-144 of SEQ ID NO: 85,
amino acids 25-148 of SEQ ID NO: 87, amino acids 25-144 of SEQ ID NO: 89,
amino acids 25-140 of SEQ ID NO: 91, amino acids 25-143 of SEQ ID NO: 93,
amino acids 25-150 of SEQ ID NO: 95, amino acids 25-147 of SEQ ID NO: 97,
amino acids 25-141 of SEQ ID NO: 99, amino acids 25-153 of SEQ ID NO: 101,
amino acids 25-152 of SEQ ID NO: 103, amino acids 25-145 of SEQ ID NO: 105,
amino acids 25-144 of SEQ ID NO: 107, amino acids 25-146 of SEQ ID NO: 109,
amino acids 25-140 of SEQ ID NO: 111, amino acids 25-143 of SEQ ID NO: 113,
amino acids 25-144 of SEQ ID NO: 115, amino acids 25-141 of SEQ ID NO: 117,
amino acids 25-149 of SEQ ID NO: 119, amino acids 25-145 of SEQ ID NO: 121,
amino acids 25-149 of SEQ ID NO: 123, amino acids 25-149 of SEQ ID NO: 125,
amino acids 25-147 of SEQ ID NO: 127, amino acids 25-147 of SEQ ID NO: 129,
amino acids 25-145 of SEQ ID NO: 131, amino acids 25-146 of SEQ ID NO: 133,
amino acids 25-152 of SEQ ID NO: 135, amino acids 25-146 of SEQ ID NO: 137,
amino acids 25-149 of SEQ ID NO: 139, amino acids 25-149 of SEQ ID NO: 141,
amino acids 25-145 of SEQ ID NO: 143, amino acids 25-142 of SEQ ID NO: 145,
amino acids 25-147 of SEQ ID NO: 147, amino acids 25-141 of SEQ ID NO: 149,
amino acids 25-140 of SEQ ID NO: 151, amino acids 25-145 of SEQ ID NO: 153,
amino acids 25-153 of SEQ ID NO: 155, amino acids 25-146 of SEQ ID NO: 157,
amino acids 25-149 of SEQ ID NO: 159, amino acids 25-141 of SEQ ID NO: 161,
amino acids 25-156 of SEQ ID NO: 163, amino acids 25-141 of SEQ ID NO: 165,
amino acids 25-140 of SEQ ID NO: 167, amino acids 25-140 of SEQ ID NO: 169,
amino acids 25-141 of SEQ ID NO: 171, amino acids 25-140 of SEQ ID NO: 173,
amino acids 25-144 of SEQ ID NO: 175, amino acids 25-142 of SEQ ID NO: 177,
amino acids 25-145 of SEQ ID NO: 179, amino acids 25-145 of SEQ ID NO: 181,
amino acids 25-143 of SEQ ID NO: 183, amino acids 25-147 of SEQ ID NO: 185,
amino acids 25-143 of SEQ ID NO: 187, amino acids 25-145 of SEQ ID NO: 189,
amino acids 25-144 of SEQ ID NO: 191, amino acids 25-143 of SEQ ID NO: 193,
amino acids 25-146 of SEQ ID NO: 195, amino acids 25-141 of SEQ ID NO: 197,
amino acids 25-146 of SEQ ID NO: 199, amino acids 25-142 of SEQ ID NO: 201,
amino acids 25-139 of SEQ ID NO: 203, amino acids 25-144 of SEQ ID NO: 205,
amino acids 25-146 of SEQ ID NO: 207, amino acids 25-142 of SEQ ID NO: 209,
amino acids 25-151 of SEQ ID NO: 211, amino acids 25-141 of SEQ ID NO: 213,
amino acids 25-140 of SEQ ID NO: 215, amino acids 25-146 of SEQ ID NO: 217,
amino acids 25-142 of SEQ ID NO: 219, amino acids 25-143 of SEQ ID NO: 221,
amino acids 25-150 of SEQ ID NO: 223, amino acids 25-144 of SEQ ID NO: 225,
amino acids 25-145 of SEQ ID NO: 227, amino acids 25-149 of SEQ ID NO: 229,
amino acids 25-147 of SEQ ID NO: 231, amino acids 25-140 of SEQ ID NO: 233,
amino acids 25-141 of SEQ ID NO: 235, amino acids 25-140 of SEQ ID NO: 237, and
amino acids 25-150 of SEQ ID NO: 239,
wherein CDRL1 comprises an amino acid sequence that has at least 85%, 90%, 95%, 96%, 97%, 98%, or 99% sequence identity to a CDRL1 amino acid sequence as set forth in a light chain variable region amino acid sequence selected from the group consisting of:
amino acids 21-132 of SEQ ID NO: 241, amino acids 21-132 of SEQ ID NO: 243,
amino acids 21-128 of SEQ ID NO: 245, amino acids 21-127 of SEQ ID NO: 247,
amino acids 21-127 of SEQ ID NO: 249, amino acids 21-127 of SEQ ID NO: 251,
amino acids 21-131 of SEQ ID NO: 253, amino acids 21-132 of SEQ ID NO: 255,
amino acids 21-127 of SEQ ID NO: 257, amino acids 21-132 of SEQ ID NO: 259,
amino acids 21-127 of SEQ ID NO: 261, amino acids 21-127 of SEQ ID NO: 263,
amino acids 21-132 of SEQ ID NO: 265, amino acids 21-132 of SEQ ID NO: 267,
amino acids 21-127 of SEQ ID NO: 269, amino acids 21-127 of SEQ ID NO: 271,
amino acids 21-127 of SEQ ID NO: 273, amino acids 21-127 of SEQ ID NO: 275,
amino acids 21-127 of SEQ ID NO: 277, amino acids 21-127 of SEQ ID NO: 279,
amino acids 21-127 of SEQ ID NO: 281, amino acids 21-127 of SEQ ID NO: 283,
amino acids 21-127 of SEQ ID NO: 285, amino acids 21-132 of SEQ ID NO: 287,
amino acids 21-127 of SEQ ID NO: 289, amino acids 21-133 of SEQ ID NO: 291,
amino acids 21-127 of SEQ ID NO: 293, amino acids 21-132 of SEQ ID NO: 295,
amino acids 21-127 of SEQ ID NO: 297, amino acids 21-132 of SEQ ID NO: 299,
amino acids 21-127 of SEQ ID NO: 301, amino acids 21-127 of SEQ ID NO: 303,
amino acids 21-132 of SEQ ID NO: 305, amino acids 21-127 of SEQ ID NO: 307,
amino acids 21-127 of SEQ ID NO: 309, amino acids 21-127 of SEQ ID NO: 311,
amino acids 21-127 of SEQ ID NO: 313, amino acids 21-128 of SEQ ID NO: 315,
amino acids 21-132 of SEQ ID NO: 317, amino acids 21-127 of SEQ ID NO: 319,
amino acids 21-133 of SEQ ID NO: 321, amino acids 21-127 of SEQ ID NO: 323,
amino acids 21-127 of SEQ ID NO: 325, amino acids 21-127 of SEQ ID NO: 327,
amino acids 21-127 of SEQ ID NO: 329, amino acids 21-127 of SEQ ID NO: 331,
amino acids 21-127 of SEQ ID NO: 333, amino acids 21-127 of SEQ ID NO: 335,
amino acids 21-127 of SEQ ID NO: 337, amino acids 21-127 of SEQ ID NO: 339,
amino acids 21-128 of SEQ ID NO: 341, amino acids 21-131 of SEQ ID NO: 343,
amino acids 21-127 of SEQ ID NO: 345, amino acids 21-131 of SEQ ID NO: 347,
amino acids 21-132 of SEQ ID NO: 349, amino acids 21-127 of SEQ ID NO: 351,
amino acids 21-127 of SEQ ID NO: 353, amino acids 21-127 of SEQ ID NO: 355,
amino acids 21-127 of SEQ ID NO: 357, amino acids 21-127 of SEQ ID NO: 359,
amino acids 21-132 of SEQ ID NO: 361, amino acids 21-133 of SEQ ID NO: 363,
amino acids 21-132 of SEQ ID NO: 365, amino acids 21-126 of SEQ ID NO: 367,
amino acids 21-127 of SEQ ID NO: 369, amino acids 21-132 of SEQ ID NO: 371,
amino acids 21-127 of SEQ ID NO: 373, amino acids 21-132 of SEQ ID NO: 375,
amino acids 21-132 of SEQ ID NO: 377, amino acids 21-128 of SEQ ID NO: 379,
amino acids 21-127 of SEQ ID NO: 381, amino acids 21-127 of SEQ ID NO: 383,
amino acids 21-127 of SEQ ID NO: 385, amino acids 21-127 of SEQ ID NO: 387,
amino acids 21-127 of SEQ ID NO: 389, amino acids 21-127 of SEQ ID NO: 391,
amino acids 21-133 of SEQ ID NO: 393, amino acids 21-127 of SEQ ID NO: 395,
amino acids 21-127 of SEQ ID NO: 397, amino acids 21-132 of SEQ ID NO: 399,
amino acids 21-127 of SEQ ID NO: 401, amino acids 21-127 of SEQ ID NO: 403,
amino acids 21-127 of SEQ ID NO: 405, amino acids 21-132 of SEQ ID NO: 407,
amino acids 21-127 of SEQ ID NO: 409, amino acids 21-127 of SEQ ID NO: 411,
amino acids 21-127 of SEQ ID NO: 413, amino acids 21-127 of SEQ ID NO: 415,
amino acids 21-127 of SEQ ID NO: 417, amino acids 21-132 of SEQ ID NO: 419,
amino acids 21-127 of SEQ ID NO: 421, amino acids 21-133 of SEQ ID NO: 423,
amino acids 21-132 of SEQ ID NO: 425, amino acids 21-128 of SEQ ID NO: 427,
amino acids 21-132 of SEQ ID NO: 429, amino acids 21-132 of SEQ ID NO: 431,
amino acids 21-127 of SEQ ID NO: 433, amino acids 21-127 of SEQ ID NO: 435,
amino acids 21-127 of SEQ ID NO: 437, amino acids 21-127 of SEQ ID NO: 439,
amino acids 21-126 of SEQ ID NO: 441, amino acids 21-132 of SEQ ID NO: 443,
amino acids 21-127 of SEQ ID NO: 445, amino acids 21-127 of SEQ ID NO: 447,
amino acids 21-127 of SEQ ID NO: 449, amino acids 21-128 of SEQ ID NO: 451,
amino acids 21-127 of SEQ ID NO: 453, amino acids 21-127 of SEQ ID NO: 455 and
amino acids 21-133 of SEQ ID NO: 457,
wherein CDRL2 comprises an amino acid sequence that that has at least 85%, 90%, 95%, 96%, 97%, 98%, or 99% sequence identity to a CDRL2 sequence as set forth in a light chain variable region amino acid sequence selected from the group consisting of:
amino acids 21-132 of SEQ ID NO: 241, amino acids 21-132 of SEQ ID NO: 243,
amino acids 21-128 of SEQ ID NO: 245, amino acids 21-127 of SEQ ID NO: 247,
amino acids 21-127 of SEQ ID NO: 249, amino acids 21-127 of SEQ ID NO: 251,
amino acids 21-131 of SEQ ID NO: 253, amino acids 21-132 of SEQ ID NO: 255,
amino acids 21-127 of SEQ ID NO: 257, amino acids 21-132 of SEQ ID NO: 259,
amino acids 21-127 of SEQ ID NO: 261, amino acids 21-127 of SEQ ID NO: 263,
amino acids 21-132 of SEQ ID NO: 265, amino acids 21-132 of SEQ ID NO: 267,
amino acids 21-127 of SEQ ID NO: 269, amino acids 21-127 of SEQ ID NO: 271,
amino acids 21-127 of SEQ ID NO: 273, amino acids 21-127 of SEQ ID NO: 275,
amino acids 21-127 of SEQ ID NO: 277, amino acids 21-127 of SEQ ID NO: 279,
amino acids 21-127 of SEQ ID NO: 281, amino acids 21-127 of SEQ ID NO: 283,
amino acids 21-127 of SEQ ID NO: 285, amino acids 21-132 of SEQ ID NO: 287,
amino acids 21-127 of SEQ ID NO: 289, amino acids 21-133 of SEQ ID NO: 291,
amino acids 21-127 of SEQ ID NO: 293, amino acids 21-132 of SEQ ID NO: 295,
amino acids 21-127 of SEQ ID NO: 297, amino acids 21-132 of SEQ ID NO: 299,
amino acids 21-127 of SEQ ID NO: 301, amino acids 21-127 of SEQ ID NO: 303,
amino acids 21-132 of SEQ ID NO: 305, amino acids 21-127 of SEQ ID NO: 307,
amino acids 21-127 of SEQ ID NO: 309, amino acids 21-127 of SEQ ID NO: 311,
amino acids 21-127 of SEQ ID NO: 313, amino acids 21-128 of SEQ ID NO: 315,
amino acids 21-132 of SEQ ID NO: 317, amino acids 21-127 of SEQ ID NO: 319,
amino acids 21-133 of SEQ ID NO: 321, amino acids 21-127 of SEQ ID NO: 323,
amino acids 21-127 of SEQ ID NO: 325, amino acids 21-127 of SEQ ID NO: 327,
amino acids 21-127 of SEQ ID NO: 329, amino acids 21-127 of SEQ ID NO: 331,
amino acids 21-127 of SEQ ID NO: 333, amino acids 21-127 of SEQ ID NO: 335,
amino acids 21-127 of SEQ ID NO: 337, amino acids 21-127 of SEQ ID NO: 339,
amino acids 21-128 of SEQ ID NO: 341, amino acids 21-131 of SEQ ID NO: 343,
amino acids 21-127 of SEQ ID NO: 345, amino acids 21-131 of SEQ ID NO: 347,
amino acids 21-132 of SEQ ID NO: 349, amino acids 21-127 of SEQ ID NO: 351,
amino acids 21-127 of SEQ ID NO: 353, amino acids 21-127 of SEQ ID NO: 355,
amino acids 21-127 of SEQ ID NO: 357, amino acids 21-127 of SEQ ID NO: 359,
amino acids 21-132 of SEQ ID NO: 361, amino acids 21-133 of SEQ ID NO: 363,
amino acids 21-132 of SEQ ID NO: 365, amino acids 21-126 of SEQ ID NO: 367,
amino acids 21-127 of SEQ ID NO: 369, amino acids 21-132 of SEQ ID NO: 371,
amino acids 21-127 of SEQ ID NO: 373, amino acids 21-132 of SEQ ID NO: 375,
amino acids 21-132 of SEQ ID NO: 377, amino acids 21-128 of SEQ ID NO: 379,
amino acids 21-127 of SEQ ID NO: 381, amino acids 21-127 of SEQ ID NO: 383,
amino acids 21-127 of SEQ ID NO: 385, amino acids 21-127 of SEQ ID NO: 387,
amino acids 21-127 of SEQ ID NO: 389, amino acids 21-127 of SEQ ID NO: 391,
amino acids 21-133 of SEQ ID NO: 393, amino acids 21-127 of SEQ ID NO: 395,
amino acids 21-127 of SEQ ID NO: 397, amino acids 21-132 of SEQ ID NO: 399,
amino acids 21-127 of SEQ ID NO: 401, amino acids 21-127 of SEQ ID NO: 403,
amino acids 21-127 of SEQ ID NO: 405, amino acids 21-132 of SEQ ID NO: 407,
amino acids 21-127 of SEQ ID NO: 409, amino acids 21-127 of SEQ ID NO: 411,
amino acids 21-127 of SEQ ID NO: 413, amino acids 21-127 of SEQ ID NO: 415,
amino acids 21-127 of SEQ ID NO: 417, amino acids 21-132 of SEQ ID NO: 419,
amino acids 21-127 of SEQ ID NO: 421, amino acids 21-133 of SEQ ID NO: 423,
amino acids 21-132 of SEQ ID NO: 425, amino acids 21-128 of SEQ ID NO: 427,
amino acids 21-132 of SEQ ID NO: 429, amino acids 21-132 of SEQ ID NO: 431,
amino acids 21-127 of SEQ ID NO: 433, amino acids 21-127 of SEQ ID NO: 435,
amino acids 21-127 of SEQ ID NO: 437, amino acids 21-127 of SEQ ID NO: 439,
amino acids 21-126 of SEQ ID NO: 441, amino acids 21-132 of SEQ ID NO: 443,
amino acids 21-127 of SEQ ID NO: 445, amino acids 21-127 of SEQ ID NO: 447,
amino acids 21-127 of SEQ ID NO: 449, amino acids 21-128 of SEQ ID NO: 451,
amino acids 21-127 of SEQ ID NO: 453, amino acids 21-127 of SEQ ID NO: 455 and
amino acids 21-133 of SEQ ID NO: 457, and
wherein CDRL3 comprises an amino acid sequence that has at least 85%, 90%, 95%, 96%, 97%, 98%, or 99% sequence identity to a CDRL3 sequence as set forth in a light chain variable region amino acid sequence selected from the group consisting of:
amino acids 21-132 of SEQ ID NO: 241, amino acids 21-132 of SEQ ID NO: 243,
amino acids 21-128 of SEQ ID NO: 245, amino acids 21-127 of SEQ ID NO: 247,
amino acids 21-127 of SEQ ID NO: 249, amino acids 21-127 of SEQ ID NO: 251,
amino acids 21-131 of SEQ ID NO: 253, amino acids 21-132 of SEQ ID NO: 255,
amino acids 21-127 of SEQ ID NO: 257, amino acids 21-132 of SEQ ID NO: 259,
amino acids 21-127 of SEQ ID NO: 261, amino acids 21-127 of SEQ ID NO: 263,
amino acids 21-132 of SEQ ID NO: 265, amino acids 21-132 of SEQ ID NO: 267,
amino acids 21-127 of SEQ ID NO: 269, amino acids 21-127 of SEQ ID NO: 271,
amino acids 21-127 of SEQ ID NO: 273, amino acids 21-127 of SEQ ID NO: 275,
amino acids 21-127 of SEQ ID NO: 277, amino acids 21-127 of SEQ ID NO: 279,
amino acids 21-127 of SEQ ID NO: 281, amino acids 21-127 of SEQ ID NO: 283,
amino acids 21-127 of SEQ ID NO: 285, amino acids 21-132 of SEQ ID NO: 287,
amino acids 21-127 of SEQ ID NO: 289, amino acids 21-133 of SEQ ID NO: 291,
amino acids 21-127 of SEQ ID NO: 293, amino acids 21-132 of SEQ ID NO: 295,
amino acids 21-127 of SEQ ID NO: 297, amino acids 21-132 of SEQ ID NO: 299,
amino acids 21-127 of SEQ ID NO: 301, amino acids 21-127 of SEQ ID NO: 303,
amino acids 21-132 of SEQ ID NO: 305, amino acids 21-127 of SEQ ID NO: 307,
amino acids 21-127 of SEQ ID NO: 309, amino acids 21-127 of SEQ ID NO: 311,
amino acids 21-127 of SEQ ID NO: 313, amino acids 21-128 of SEQ ID NO: 315,
amino acids 21-132 of SEQ ID NO: 317, amino acids 21-127 of SEQ ID NO: 319,
amino acids 21-133 of SEQ ID NO: 321, amino acids 21-127 of SEQ ID NO: 323,
amino acids 21-127 of SEQ ID NO: 325, amino acids 21-127 of SEQ ID NO: 327,
amino acids 21-127 of SEQ ID NO: 329, amino acids 21-127 of SEQ ID NO: 331,
amino acids 21-127 of SEQ ID NO: 333, amino acids 21-127 of SEQ ID NO: 335,
amino acids 21-127 of SEQ ID NO: 337, amino acids 21-127 of SEQ ID NO: 339,
amino acids 21-128 of SEQ ID NO: 341, amino acids 21-131 of SEQ ID NO: 343,
amino acids 21-127 of SEQ ID NO: 345, amino acids 21-131 of SEQ ID NO: 347,
amino acids 21-132 of SEQ ID NO: 349, amino acids 21-127 of SEQ ID NO: 351,
amino acids 21-127 of SEQ ID NO: 353, amino acids 21-127 of SEQ ID NO: 355,
amino acids 21-127 of SEQ ID NO: 357, amino acids 21-127 of SEQ ID NO: 359,
amino acids 21-132 of SEQ ID NO: 361, amino acids 21-133 of SEQ ID NO: 363,
amino acids 21-132 of SEQ ID NO: 365, amino acids 21-126 of SEQ ID NO: 367,
amino acids 21-127 of SEQ ID NO: 369, amino acids 21-132 of SEQ ID NO: 371,
amino acids 21-127 of SEQ ID NO: 373, amino acids 21-132 of SEQ ID NO: 375,
amino acids 21-132 of SEQ ID NO: 377, amino acids 21-128 of SEQ ID NO: 379,
amino acids 21-127 of SEQ ID NO: 381, amino acids 21-127 of SEQ ID NO: 383,
amino acids 21-127 of SEQ ID NO: 385, amino acids 21-127 of SEQ ID NO: 387,
amino acids 21-127 of SEQ ID NO: 389, amino acids 21-127 of SEQ ID NO: 391,
amino acids 21-133 of SEQ ID NO: 393, amino acids 21-127 of SEQ ID NO: 395,
amino acids 21-127 of SEQ ID NO: 397, amino acids 21-132 of SEQ ID NO: 399,
amino acids 21-127 of SEQ ID NO: 401, amino acids 21-127 of SEQ ID NO: 403,
amino acids 21-127 of SEQ ID NO: 405, amino acids 21-132 of SEQ ID NO: 407,
amino acids 21-127 of SEQ ID NO: 409, amino acids 21-127 of SEQ ID NO: 411,
amino acids 21-127 of SEQ ID NO: 413, amino acids 21-127 of SEQ ID NO: 415,
amino acids 21-127 of SEQ ID NO: 417, amino acids 21-132 of SEQ ID NO: 419,
amino acids 21-127 of SEQ ID NO: 421, amino acids 21-133 of SEQ ID NO: 423,
amino acids 21-132 of SEQ ID NO: 425, amino acids 21-128 of SEQ ID NO: 427,
amino acids 21-132 of SEQ ID NO: 429, amino acids 21-132 of SEQ ID NO: 431,
amino acids 21-127 of SEQ ID NO: 433, amino acids 21-127 of SEQ ID NO: 435,
amino acids 21-127 of SEQ ID NO: 437, amino acids 21-127 of SEQ ID NO: 439,
amino acids 21-126 of SEQ ID NO: 441, amino acids 21-132 of SEQ ID NO: 443,
amino acids 21-127 of SEQ ID NO: 445, amino acids 21-127 of SEQ ID NO: 447,
amino acids 21-127 of SEQ ID NO: 449, amino acids 21-128 of SEQ ID NO: 451,
amino acids 21-127 of SEQ ID NO: 453, amino acids 21-127 of SEQ ID NO: 455 and
amino acids 21-133 of SEQ ID NO: 457.

[0106] The CDRH1, CDRH2, CDRH3, CDRL1, CDRL2 and CDRL3 amino acid sequence for human ST2 IgG1 Antibodies 1-109 are provided below in Table 2D.

TABLE 2D
Sequence identifiers for human ST2 IgG1 antibody CDR amino acid
sequences. The CDR sequences are defined according to IMGT.

| Human | CDRH1 | CDRH2 | CDRH3 | CDRL1 | CDRL2 | CDRL3 |
|---|---|---|---|---|---|---|
| ST2 IgG1 | SEQ ID | SEQ ID | SEQ ID | SEQ ID | SEQ ID | SEQ ID |
| Antibody | NO: | NO: | NO: | NO: | NO: | NO: |
| 1 | 458 | 459 | 460 | 461 | 462 | 463 |
| 2 | 464 | 465 | 466 | 467 | 468 | 469 |
| 3 | 470 | 471 | 472 | 473 | 474 | 475 |
| 4 | 476 | 477 | 478 | 479 | 480 | 481 |
| 5 | 482 | 483 | 484 | 485 | 486 | 487 |
| 6 | 488 | 489 | 490 | 491 | 492 | 493 |
| 7 | 494 | 495 | 496 | 497 | 498 | 499 |
| 8 | 500 | 501 | 502 | 503 | 504 | 505 |
| 9 | 506 | 507 | 508 | 509 | 510 | 511 |
| 10 | 512 | 513 | 514 | 515 | 516 | 517 |
| 11 | 518 | 519 | 520 | 521 | 522 | 523 |
| 12 | 524 | 525 | 526 | 527 | 528 | 529 |
| 13 | 530 | 531 | 532 | 533 | 534 | 535 |
| 14 | 536 | 537 | 538 | 539 | 540 | 541 |
| 15 | 542 | 543 | 544 | 545 | 546 | 547 |
| 16 | 548 | 549 | 550 | 551 | 552 | 553 |
| 17 | 554 | 555 | 556 | 557 | 558 | 559 |
| 18 | 560 | 561 | 562 | 563 | 564 | 565 |
| 19 | 566 | 567 | 568 | 569 | 570 | 571 |
| 20 | 572 | 573 | 574 | 575 | 576 | 577 |
| 21 | 578 | 579 | 580 | 581 | 582 | 583 |
| 22 | 584 | 585 | 586 | 587 | 588 | 589 |
| 23 | 590 | 591 | 592 | 593 | 594 | 595 |
| 24 | 596 | 597 | 598 | 599 | 600 | 601 |
| 25 | 602 | 603 | 604 | 605 | 606 | 607 |
| 26 | 608 | 609 | 610 | 611 | 612 | 613 |
| 27 | 614 | 615 | 616 | 617 | 618 | 619 |
| 28 | 620 | 621 | 622 | 623 | 624 | 625 |
| 29 | 626 | 627 | 628 | 629 | 630 | 631 |
| 30 | 632 | 633 | 634 | 635 | 636 | 637 |
| 31 | 638 | 639 | 640 | 641 | 642 | 643 |
| 32 | 644 | 645 | 646 | 647 | 648 | 649 |
| 33 | 650 | 651 | 652 | 653 | 654 | 655 |
| 34 | 656 | 657 | 658 | 659 | 660 | 661 |
| 35 | 662 | 663 | 664 | 665 | 666 | 667 |
| 36 | 668 | 669 | 670 | 671 | 672 | 673 |
| 37 | 674 | 675 | 676 | 677 | 678 | 679 |
| 38 | 680 | 681 | 682 | 683 | 684 | 685 |
| 39 | 686 | 687 | 688 | 689 | 690 | 691 |
| 40 | 692 | 693 | 694 | 695 | 696 | 697 |
| 41 | 698 | 699 | 700 | 701 | 702 | 703 |
| 42 | 704 | 705 | 706 | 707 | 708 | 709 |
| 43 | 710 | 711 | 712 | 713 | 714 | 715 |
| 44 | 716 | 717 | 718 | 719 | 720 | 721 |
| 45 | 722 | 723 | 724 | 725 | 726 | 727 |
| 46 | 728 | 729 | 730 | 731 | 732 | 733 |
| 47 | 734 | 735 | 736 | 737 | 738 | 739 |
| 48 | 740 | 741 | 742 | 743 | 744 | 745 |
| 49 | 746 | 747 | 748 | 749 | 750 | 751 |
| 50 | 752 | 753 | 754 | 755 | 756 | 757 |
| 51 | 758 | 759 | 760 | 761 | 762 | 763 |
| 52 | 764 | 765 | 766 | 767 | 768 | 769 |
| 53 | 770 | 771 | 772 | 773 | 774 | 775 |
| 54 | 776 | 777 | 778 | 779 | 780 | 781 |
| 55 | 782 | 783 | 784 | 785 | 786 | 787 |
| 56 | 788 | 789 | 790 | 791 | 792 | 793 |
| 57 | 794 | 795 | 796 | 797 | 798 | 799 |
| 58 | 800 | 801 | 802 | 803 | 804 | 805 |
| 59 | 806 | 807 | 808 | 809 | 810 | 811 |
| 60 | 812 | 813 | 814 | 815 | 816 | 817 |
| 61 | 818 | 819 | 820 | 821 | 822 | 823 |
| 62 | 824 | 825 | 826 | 827 | 828 | 829 |
| 63 | 830 | 831 | 832 | 833 | 834 | 835 |
| 64 | 836 | 837 | 838 | 839 | 840 | 841 |
| 65 | 842 | 843 | 844 | 845 | 846 | 847 |
| 66 | 848 | 849 | 850 | 851 | 852 | 853 |
| 67 | 854 | 855 | 856 | 857 | 858 | 859 |
| 68 | 860 | 861 | 862 | 863 | 864 | 865 |
| 69 | 866 | 867 | 868 | 869 | 870 | 871 |
| 70 | 872 | 873 | 874 | 875 | 876 | 877 |
| 71 | 878 | 879 | 880 | 881 | 882 | 883 |
| 72 | 884 | 885 | 886 | 887 | 888 | 889 |
| 73 | 890 | 891 | 892 | 893 | 894 | 895 |
| 74 | 896 | 897 | 898 | 899 | 900 | 901 |
| 75 | 902 | 903 | 904 | 905 | 906 | 907 |
| 76 | 908 | 909 | 910 | 911 | 912 | 913 |
| 77 | 914 | 915 | 916 | 917 | 918 | 919 |
| 78 | 920 | 921 | 922 | 923 | 924 | 925 |
| 79 | 926 | 927 | 928 | 929 | 930 | 931 |
| 80 | 932 | 933 | 934 | 935 | 936 | 937 |
| 81 | 938 | 939 | 940 | 941 | 942 | 943 |
| 82 | 944 | 945 | 946 | 947 | 948 | 949 |
| 83 | 950 | 951 | 952 | 953 | 954 | 955 |
| 84 | 956 | 957 | 958 | 959 | 960 | 961 |
| 85 | 962 | 963 | 964 | 965 | 966 | 967 |
| 86 | 968 | 969 | 970 | 971 | 972 | 973 |
| 87 | 974 | 975 | 976 | 977 | 978 | 979 |
| 88 | 980 | 981 | 982 | 983 | 984 | 985 |
| 89 | 986 | 987 | 988 | 989 | 990 | 991 |
| 90 | 992 | 993 | 994 | 995 | 996 | 997 |
| 91 | 998 | 999 | 1000 | 1001 | 1002 | 1003 |
| 92 | 1004 | 1005 | 1006 | 1007 | 1008 | 1009 |
| 93 | 1010 | 1011 | 1012 | 1013 | 1014 | 1015 |
| 94 | 1016 | 1017 | 1018 | 1019 | 1020 | 1021 |
| 95 | 1022 | 1023 | 1024 | 1025 | 1026 | 1027 |
| 96 | 1028 | 1029 | 1030 | 1031 | 1032 | 1033 |
| 97 | 1034 | 1035 | 1036 | 1037 | 1038 | 1039 |
| 98 | 1040 | 1041 | 1042 | 1043 | 1044 | 1045 |
| 99 | 1046 | 1047 | 1048 | 1049 | 1050 | 1051 |
| 100 | 1052 | 1053 | 1054 | 1055 | 1056 | 1057 |
| 101 | 1058 | 1059 | 1060 | 1061 | 1062 | 1063 |
| 102 | 1064 | 1065 | 1066 | 1067 | 1068 | 1069 |
| 103 | 1070 | 1071 | 1072 | 1073 | 1074 | 1075 |
| 104 | 1076 | 1077 | 1078 | 1079 | 1080 | 1081 |
| 105 | 1082 | 1083 | 1084 | 1085 | 1086 | 1087 |
| 106 | 1088 | 1089 | 1090 | 1091 | 1092 | 1093 |
| 107 | 1094 | 1095 | 1096 | 1097 | 1098 | 1099 |
| 108 | 1100 | 1101 | 1102 | 1103 | 1104 | 1105 |
| 109 | 1106 | 1107 | 1108 | 1109 | 1110 | 1111 |

[0107] In some embodiments, the disclosure relates to an isolated antibody or antigen-binding fragment thereof that specifically binds ST2, comprising a heavy chain variable domain comprising complementarity determining regions (CDRs) as set forth in a heavy chain variable domain amino acid sequence selected from the group consisting of:

amino acids 25-147 of SEQ ID NO: 23, amino acids 25-147 of SEQ ID NO: 25,
amino acids 25-145 of SEQ ID NO: 27, amino acids 25-148 of SEQ ID NO: 29,
amino acids 25-141 of SEQ ID NO: 31, amino acids 25-143 of SEQ ID NO: 33,
amino acids 25-150 of SEQ ID NO: 35, amino acids 25-148 of SEQ ID NO: 37,
amino acids 25-146 of SEQ ID NO: 39, amino acids 25-145 of SEQ ID NO: 41,
amino acids 25-143 of SEQ ID NO: 43, amino acids 25-151 of SEQ ID NO: 45,
amino acids 25-141 of SEQ ID NO: 47, amino acids 25-140 of SEQ ID NO: 49,
amino acids 25-145 of SEQ ID NO: 51, amino acids 25-152 of SEQ ID NO: 53,
amino acids 25-142 of SEQ ID NO: 55, amino acids 25-147 of SEQ ID NO: 57,
amino acids 25-141 of SEQ ID NO: 59, amino acids 25-148 of SEQ ID NO: 61,
amino acids 25-142 of SEQ ID NO: 63, amino acids 25-145 of SEQ ID NO: 65,
amino acids 25-140 of SEQ ID NO: 67, amino acids 25-145 of SEQ ID NO: 69,
amino acids 25-140 of SEQ ID NO: 71, amino acids 25-140 of SEQ ID NO: 73,
amino acids 25-145 of SEQ ID NO: 75, amino acids 25-143 of SEQ ID NO: 77,
amino acids 25-143 of SEQ ID NO: 79, amino acids 25-151 of SEQ ID NO: 81,
amino acids 25-142 of SEQ ID NO: 83, amino acids 25-144 of SEQ ID NO: 85,
amino acids 25-148 of SEQ ID NO: 87, amino acids 25-144 of SEQ ID NO: 89,
amino acids 25-140 of SEQ ID NO: 91, amino acids 25-143 of SEQ ID NO: 93,
amino acids 25-150 of SEQ ID NO: 95, amino acids 25-147 of SEQ ID NO: 97,
amino acids 25-141 of SEQ ID NO: 99, amino acids 25-153 of SEQ ID NO: 101,
amino acids 25-152 of SEQ ID NO: 103, amino acids 25-145 of SEQ ID NO: 105,
amino acids 25-144 of SEQ ID NO: 107, amino acids 25-146 of SEQ ID NO: 109,
amino acids 25-140 of SEQ ID NO: 111, amino acids 25-143 of SEQ ID NO: 113,
amino acids 25-144 of SEQ ID NO: 115, amino acids 25-141 of SEQ ID NO: 117,
amino acids 25-149 of SEQ ID NO: 119, amino acids 25-145 of SEQ ID NO: 121,
amino acids 25-149 of SEQ ID NO: 123, amino acids 25-149 of SEQ ID NO: 125,
amino acids 25-147 of SEQ ID NO: 127, amino acids 25-147 of SEQ ID NO: 129,
amino acids 25-145 of SEQ ID NO: 131, amino acids 25-146 of SEQ ID NO: 133,
amino acids 25-152 of SEQ ID NO: 135, amino acids 25-146 of SEQ ID NO: 137,
amino acids 25-149 of SEQ ID NO: 139, amino acids 25-149 of SEQ ID NO: 141,
amino acids 25-145 of SEQ ID NO: 143, amino acids 25-142 of SEQ ID NO: 145,
amino acids 25-147 of SEQ ID NO: 147, amino acids 25-141 of SEQ ID NO: 149,
amino acids 25-140 of SEQ ID NO: 151, amino acids 25-145 of SEQ ID NO: 153,
amino acids 25-153 of SEQ ID NO: 155, amino acids 25-146 of SEQ ID NO: 157,
amino acids 25-149 of SEQ ID NO: 159, amino acids 25-141 of SEQ ID NO: 161,
amino acids 25-156 of SEQ ID NO: 163, amino acids 25-141 of SEQ ID NO: 165,
amino acids 25-140 of SEQ ID NO: 167, amino acids 25-140 of SEQ ID NO: 169,
amino acids 25-141 of SEQ ID NO: 171, amino acids 25-140 of SEQ ID NO: 173,
amino acids 25-144 of SEQ ID NO: 175, amino acids 25-142 of SEQ ID NO: 177,
amino acids 25-145 of SEQ ID NO: 179, amino acids 25-145 of SEQ ID NO: 181,
amino acids 25-143 of SEQ ID NO: 183, amino acids 25-147 of SEQ ID NO: 185,
amino acids 25-143 of SEQ ID NO: 187, amino acids 25-145 of SEQ ID NO: 189,
amino acids 25-144 of SEQ ID NO: 191, amino acids 25-143 of SEQ ID NO: 193,
amino acids 25-146 of SEQ ID NO: 195, amino acids 25-141 of SEQ ID NO: 197,
amino acids 25-146 of SEQ ID NO: 199, amino acids 25-142 of SEQ ID NO: 201,
amino acids 25-139 of SEQ ID NO: 203, amino acids 25-144 of SEQ ID NO: 205,
amino acids 25-146 of SEQ ID NO: 207, amino acids 25-142 of SEQ ID NO: 209,
amino acids 25-151 of SEQ ID NO: 211, amino acids 25-141 of SEQ ID NO: 213,
amino acids 25-140 of SEQ ID NO: 215, amino acids 25-146 of SEQ ID NO: 217,
amino acids 25-142 of SEQ ID NO: 219, amino acids 25-143 of SEQ ID NO: 221,
amino acids 25-150 of SEQ ID NO: 223, amino acids 25-144 of SEQ ID NO: 225,
amino acids 25-145 of SEQ ID NO: 227, amino acids 25-149 of SEQ ID NO: 229,
amino acids 25-147 of SEQ ID NO: 231, amino acids 25-140 of SEQ ID NO: 233,
amino acids 25-141 of SEQ ID NO: 235, amino acids 25-140 of SEQ ID NO: 237, and
amino acids 25-150 of SEQ ID NO: 239; and

[0108] comprising a light chain variable domain comprising CDRs as set forth in a light chain variable region amino acid sequence selected from the group consisting of:

amino acids 21-132 of SEQ ID NO: 241, amino acids 21-132 of SEQ ID NO: 243,
amino acids 21-128 of SEQ ID NO: 245, amino acids 21-127 of SEQ ID NO: 247,
amino acids 21-127 of SEQ ID NO: 249, amino acids 21-127 of SEQ ID NO: 251,
amino acids 21-131 of SEQ ID NO: 253, amino acids 21-132 of SEQ ID NO: 255,
amino acids 21-127 of SEQ ID NO: 257, amino acids 21-132 of SEQ ID NO: 259,
amino acids 21-127 of SEQ ID NO: 261, amino acids 21-127 of SEQ ID NO: 263,
amino acids 21-132 of SEQ ID NO: 265, amino acids 21-132 of SEQ ID NO: 267,
amino acids 21-127 of SEQ ID NO: 269, amino acids 21-127 of SEQ ID NO: 271,
amino acids 21-127 of SEQ ID NO: 273, amino acids 21-127 of SEQ ID NO: 275,
amino acids 21-127 of SEQ ID NO: 277, amino acids 21-127 of SEQ ID NO: 279,
amino acids 21-127 of SEQ ID NO: 281, amino acids 21-127 of SEQ ID NO: 283,
amino acids 21-127 of SEQ ID NO: 285, amino acids 21-132 of SEQ ID NO: 287,
amino acids 21-127 of SEQ ID NO: 289, amino acids 21-133 of SEQ ID NO: 291,
amino acids 21-127 of SEQ ID NO: 293, amino acids 21-132 of SEQ ID NO: 295,
amino acids 21-127 of SEQ ID NO: 297, amino acids 21-132 of SEQ ID NO: 299,
amino acids 21-127 of SEQ ID NO: 301, amino acids 21-127 of SEQ ID NO: 303,
amino acids 21-132 of SEQ ID NO: 305, amino acids 21-127 of SEQ ID NO: 307,
amino acids 21-127 of SEQ ID NO: 309, amino acids 21-127 of SEQ ID NO: 311,
amino acids 21-127 of SEQ ID NO: 313, amino acids 21-128 of SEQ ID NO: 315,
amino acids 21-132 of SEQ ID NO: 317, amino acids 21-127 of SEQ ID NO: 319,
amino acids 21-133 of SEQ ID NO: 321, amino acids 21-127 of SEQ ID NO: 323,
amino acids 21-127 of SEQ ID NO: 325, amino acids 21-127 of SEQ ID NO: 327,
amino acids 21-127 of SEQ ID NO: 329, amino acids 21-127 of SEQ ID NO: 331,
amino acids 21-127 of SEQ ID NO: 333, amino acids 21-127 of SEQ ID NO: 335,
amino acids 21-127 of SEQ ID NO: 337, amino acids 21-127 of SEQ ID NO: 339,
amino acids 21-128 of SEQ ID NO: 341, amino acids 21-131 of SEQ ID NO: 343,
amino acids 21-127 of SEQ ID NO: 345, amino acids 21-131 of SEQ ID NO: 347,
amino acids 21-132 of SEQ ID NO: 349, amino acids 21-127 of SEQ ID NO: 351,
amino acids 21-127 of SEQ ID NO: 353, amino acids 21-127 of SEQ ID NO: 355,
amino acids 21-127 of SEQ ID NO: 357, amino acids 21-127 of SEQ ID NO: 359,
amino acids 21-132 of SEQ ID NO: 361, amino acids 21-133 of SEQ ID NO: 363,
amino acids 21-132 of SEQ ID NO: 365, amino acids 21-126 of SEQ ID NO: 367,
amino acids 21-127 of SEQ ID NO: 369, amino acids 21-132 of SEQ ID NO: 371,
amino acids 21-127 of SEQ ID NO: 373, amino acids 21-132 of SEQ ID NO: 375,
amino acids 21-132 of SEQ ID NO: 377, amino acids 21-128 of SEQ ID NO: 379,
amino acids 21-127 of SEQ ID NO: 381, amino acids 21-127 of SEQ ID NO: 383,
amino acids 21-127 of SEQ ID NO: 385, amino acids 21-127 of SEQ ID NO: 387,
amino acids 21-127 of SEQ ID NO: 389, amino acids 21-127 of SEQ ID NO: 391,
amino acids 21-133 of SEQ ID NO: 393, amino acids 21-127 of SEQ ID NO: 395,
amino acids 21-127 of SEQ ID NO: 397, amino acids 21-132 of SEQ ID NO: 399,
amino acids 21-127 of SEQ ID NO: 401, amino acids 21-127 of SEQ ID NO: 403,
amino acids 21-127 of SEQ ID NO: 405, amino acids 21-132 of SEQ ID NO: 407,
amino acids 21-127 of SEQ ID NO: 409, amino acids 21-127 of SEQ ID NO: 411,
amino acids 21-127 of SEQ ID NO: 413, amino acids 21-127 of SEQ ID NO: 415,
amino acids 21-127 of SEQ ID NO: 417, amino acids 21-132 of SEQ ID NO: 419,
amino acids 21-127 of SEQ ID NO: 421, amino acids 21-133 of SEQ ID NO: 423,
amino acids 21-132 of SEQ ID NO: 425, amino acids 21-128 of SEQ ID NO: 427,
amino acids 21-132 of SEQ ID NO: 429, amino acids 21-132 of SEQ ID NO: 431,
amino acids 21-127 of SEQ ID NO: 433, amino acids 21-127 of SEQ ID NO: 435,
amino acids 21-127 of SEQ ID NO: 437, amino acids 21-127 of SEQ ID NO: 439,
amino acids 21-126 of SEQ ID NO: 441, amino acids 21-132 of SEQ ID NO: 443,
amino acids 21-127 of SEQ ID NO: 445, amino acids 21-127 of SEQ ID NO: 447,
amino acids 21-127 of SEQ ID NO: 449, amino acids 21-128 of SEQ ID NO: 451,
amino acids 21-127 of SEQ ID NO: 453, amino acids 21-127 of SEQ ID NO: 455 and
amino acids 21-133 of SEQ ID NO: 457.

[0109] In some aspects, the disclosure relates to a recombinant antibody or an antigen-binding fragment thereof that specifically binds ST2, wherein the antibody, or antigen-binding fragment thereof, comprises six complementarity determining regions (CDRs): CDRH1, CDRH2, CDRH3, CDRL1, CDRL2, and CDRL3 as set forth in Table 2D. For example, in some embodiments, the antibody or antigen-binding fragment thereof comprises the six complementarity determining regions (CDRs): CDRH1, CDRH2, CDRH3, CDRL1, CDRL2, and CDRL3 of Antibody1, the six complementarity determining regions (CDRs): CDRH1, CDRH2, CDRH3, CDRL1, CDRL2, and CDRL3 of Antibody 2, or the six complementarity determining regions (CDRs): CDRH1, CDRH2, CDRH3, CDRL1, CDRL2, and CDRL3 of Antibody 3, etc., as set forth in Table 2D. In some embodiments, the CDRH1 comprises an amino acid sequence that has at least 85%, 90%, 95%, 96%, 97%, 98%, or 99% sequence identity to a CDRH1 amino acid sequence set forth in Table 2D. In some embodiments, the CDRH2 comprises an amino acid sequence that has at least 85%, 90%, 95%, 96%, 97%, 98%, or 99% sequence identity to a CDRH2 amino acid sequence set forth in Table 2D. In some embodiments, the CDRH3 comprises an amino acid sequence that has at least 85%, 90%, 95%, 96%, 97%, 98%, or 99% sequence identity to a CDRH3 amino acid sequence set forth in Table 2D. In some embodiments, the CDRL1 comprises an amino acid sequence that has at least 85%, 90%, 95%, 96%, 97%, 98%, or 99% sequence identity to a CDRL1 amino acid sequence set forth in Table 2D. In some embodiments, the CDRL2 comprises an amino acid sequence that has at least 85%, 90%, 95%, 96%, 97%, 98%, or 99% sequence identity to a CDRL2 amino acid sequence set forth in Table 2D. In some embodiments, the CDRL3 comprises an amino acid sequence that has at least 85%, 90%, 95%, 96%, 97%, 98%, or 99% sequence identity to a CDRL3 amino acid sequence set forth in Table 2D.

### Linkage Between an IL-2R-Binding Moiety and an ST2-Binding Moiety

[0110] The IL-2R and ST2 binding moieties are linked. A first moiety that binds to the IL-2 receptor and a second moiety that binds to ST2 are linked covalently or non-covalently. In some embodiments, the first moiety that binds to the IL-2 receptor and the second moiety that binds to ST2 are covalently linked. For example, the first moiety that binds to the IL-2 receptor and the second moiety that binds to ST2 can be covalently linked by a sulfide bond or a disulfide bond. In some embodiments, a compound comprising a first moiety that binds to the IL-2 receptor and a second moiety that binds to ST2 comprises a multimerization moiety or two multimerization moieties, for example, Fc domains. For example, a first multimerization moiety can be covalently linked to the first moiety that binds to the IL-2 receptor and a second multimerization moiety can be covalently linked to the second moiety that binds to ST2. The two multimerization moieties also can be covalently linked to each other. In some embodiments, the two multimerization moieties are polypeptide sequences. For example, in some embodiments, a disulfide bond covalently links a first Fc domain that is covalently linked to the IL-2R-binding moiety and a second Fc domain that is covalently linked to the ST2-binding moiety.

### Immunoglobulin Fc Domains

[0111] In some embodiments, a multimerization moiety is an immunoglobulin Fc domain, for example, an immunoglobulin Fc domain that is deficient in effector functions relative to a corresponding wild-type immunoglobulin Fc domain. Non-limiting examples of immunoglobulin Fc domains are IgG, IgA, IgD, IgM, and IgE immunoglobulin Fc domains. In some embodiments, an immunoglobulin Fc domains is an IgG1 immunoglobulin Fc domain.

[0112] Immunoglobulin Fc domains have a number of therapeutic benefits when incorporated into fusion proteins. For example, immunoglobulin Fc domains can increase the circulating half-life of the fusion partner protein.

[0113] In some embodiments, the increased circulating half-life is due to the Fc domain preventing aggregation of the fusion protein, thereby increasing its stability and slowing clearance.

[0114] The four human IgG subclasses differ in effector functions (CDC, ADCC), circulating half-life, and stability. IgG1 possesses Fc effector functions, and is the most abundant IgG subclass. IgG2 is deficient in Fc effector functions, but is subject to both dimerization with other IgG2 molecules, and instability due to scrambling of disulfide bonds in the hinge region. IgG3 possesses Fc effector functions, and has a long, rigid hinge region. IgG4 is deficient in Fc effector functions, and has a shorter circulating half-life than the other subclasses. The IgG4 dimer is biochemically unstable due to having only a single disulfide bond in the hinge region leading to the exchange of H chains between different IgG4 molecules. Fc sequence modifications can be made to the hinge region of an IgG2 Fc to prevent aggregation, or to the hinge region of an IgG4 Fc to stabilize dimers.

[0115] Effector function-deficient variants of IgG1 can be generated. For example, an amino acid substitution can be made at position N297, the location of an N-linked glycosylation site. In some embodiments, the substitution is N297A. Substitution of this asparagine residue removes the glycosylation site and significantly reduces antibody-dependent cell-mediated cytotoxicity (ADCC) and complement-dependent cytotoxicity (CDC) activity, thereby preventing unwanted cell lysis.

[0116] Various other effector function-deficient IgG1 variants can also be appreciated by the skilled worker. One non-limiting example of such a variant is IgG1 (L234F/L235E/P331S), which mutates amino acids in the Clq and FcyR binding sites. These (or similar) Fc variants can be used to generate effector-deficient and stable IL-2 selective agonist-Fc fusion proteins (IL2SA-Fc). Forms of Fc protein moieties also can be engineered to create stable monomers rather than dimers. These modified Fc protein moieties also can be combined with an IL-2 compound of the present disclosure. Additionally, a functionally monomeric heterodimer comprising an IL-2-Fc H chain polypeptide can be combined with an Fc H chain polypeptide and assembled using bispecific antibody technology with an IL-2 selective agonist. IL-2 Fc fusion proteins also can be made with intact IgG antibody molecules, either with or without antigen specificity in the IgG moiety. Moreover, Fc variants that lack some of the hinge region can be used with the compounds and methods described herein.

[0117] In some embodiments, the sequence of an immunoglobulin Fc moiety is an IgG1 Fc moiety comprising an N297A mutation, for example, the sequence shown below:

(SEQ ID NO: 7; N297A mutation
is shown in bold and underlined)
DKTHTCPPCPAPELLGGPSVFLFPPKPKDTLMISRTPEVTCVVVDVSHEDP
EVKFNWYVDGVEVHNAKTKPREEQYASTYRVVSVLTVLHQDWLNGKEYKCK
VSNKALPAPIEKTISKAKGQPREPQVYTLPPSRDELTKNQVSLTCLVKGFY
PSDIAVEWESNGQPENNYKTTPPVLDSDGSFFLYSKLTVDKSRWQQGNVFS
CSVMHEALHNHYTQKSLSLSPG.

[0118] In some embodiments, the IgG1 Fc moiety has at least 60%, at least 61%, at least 62%, at least 63%, at least 64%, at least 65%, at least 66%, at least 67%, at least 68%, at least 69%, at least 70%, at least 71%, at least 72%, at least 73%, at least 74%, at least 75%, at least 76%, at least 77%, at least 78%, at least 79%, at least 80%, at least 81%, at least 82%, at least 83%, at least 84%, at least 85%, at least 86%, at least 87%, at least 88%, at least 89%, at least 90%, at least 91%, at least 92%, at least 93%, at least 94%, at least 95%, at least 96%, at least 97%, at least 98%, or at least 99% sequence identity to the amino acid sequence of SEQ ID NO: 7.

[0119] The compound of the present disclosure can be produced under conditions that allow two Ig polypeptides to form an Fc domain. The two Ig polypeptides can be conjugated with different moieties. In some cases one IgG polypeptide is conjugated to an IL-2 moiety and the second Ig polypeptide is bound to a moiety that binds a cell surface protein other than the IL2 receptor. In some embodiments the cell surface protein bound by the binding moiety is ST2.

### Linker

[0120] The linkage at the junction between an Fc domain and an IL2 receptor-binding moiety or an ST2-binding moiety can be: (1) a direct fusion of the two protein sequences; (2) a fusion with an intervening linker peptide; or (3) a fusion by a non-peptide moiety. In some embodiments, a linker directly links an IL2R-binding moiety and an ST2-binding moiety. Linker peptides can be included as spacers between two protein moieties. Linker peptides can promote proper protein folding, stability, expression, and bioactivity of the component protein moieties. Long flexible linker peptides can be composed of glycine, serine, or threonine, with multiple glycine residues providing a highly flexible conformation. Serine or threonine residues provide polar surface area to limit hydrophobic interaction within the peptide or with the component fusion protein moieties. In some embodiments, peptide linkers are rich in glycine and serine, such as repeats of the sequence GGGGS (SEQ ID NO: 21). In some embodiments, a peptide linker has a sequence of (GGGGS)ₙ (SEQ ID NO: 21), wherein n is 1, 2, 3, 4, 5, 6, 7, 8, 9, or 10. In some embodiments, n is 3; i.e., a peptide linker has a sequence of GGGGSGGGGSGGGGS (SEQ ID NO: 6). In some embodiments, the IL-2 receptor-binding moiety is N-terminal to the linker peptide, and the immunoglobulin Fc domain is C-terminal to the linker peptide. In some embodiments, the IL-2 receptor-binding moiety is C-terminal to the linker peptide, and the immunoglobulin Fc domain is N-terminal to the linker peptide.

[0121] In some embodiments, the peptide linker has at least 60%, at least 61%, at least 62%, at least 63%, at least 64%, at least 65%, at least 66%, at least 67%, at least 68%, at least 69%, at least 70%, at least 71%, at least 72%, at least 73%, at least 74%, at least 75%, at least 76%, at least 77%, at least 78%, at least 79%, at least 80%, at least 81%, at least 82%, at least 83%, at least 84%, at least 85%, at least 86%, at least 87%, at least 88%, at least 89%, at least 90%, at least 91%, at least 92%, at least 93%, at least 94%, at least 95%, at least 96%, at least 97%, at least 98%, or at least 99% sequence identity to the amino acid sequence of SEQ ID NO: 6.

### Pharmaceutical Compositions

[0122] A pharmaceutical composition of the invention can comprise any compound described herein. In some embodiments, a pharmaceutical composition comprises a compound of the present disclosure with other chemical components, such as carriers, stabilizers, diluents, dispersing agents, suspending agents, thickening agents, and/or excipients. The pharmaceutical composition facilitates administration of a compound of the present disclosure to an organism. Pharmaceutical compositions can be administered in therapeutically-effective amounts as pharmaceutical compositions by various forms and routes including, for example, intravenous, subcutaneous, intramuscular, oral, parenteral, ophthalmic, subcutaneous, transdermal, nasal, vaginal, and topical administration.

[0123] A pharmaceutical composition can be administered in a local manner, for example, via injection of the compound directly into an organ, optionally in a depot or sustained release formulation or implant. Pharmaceutical compositions can be provided in the form of a rapid release formulation, in the form of an extended release formulation, or in the form of an intermediate release formulation. A rapid release form can provide an immediate release. An extended release formulation can provide a controlled release or a sustained delayed release.

[0124] For oral administration, pharmaceutical compositions can be formulated by combining a compound of the present disclosure with pharmaceutically-acceptable carriers or excipients. Such carriers can be used to formulate liquids, gels, syrups, elixirs, slurries, or suspensions, for oral ingestion by a subject. Non-limiting examples of solvents used in an oral dissolvable formulation can include water, ethanol, isopropanol, saline, physiological saline, DMSO, dimethylformamide, potassium phosphate buffer, phosphate buffer saline (PBS), sodium phosphate buffer, 4-2-hydroxyethyl-1-piperazineethanesulfonic acid buffer (HEPES), 3-(N-morpholino)propanesulfonic acid buffer (MOPS), piperazine-N,N′-bis(2-ethanesulfonic acid) buffer (PIPES), and saline sodium citrate buffer (SSC). Non-limiting examples of co-solvents used in an oral dissolvable formulation can include sucrose, urea, cremaphor, DMSO, and potassium phosphate buffer.

[0125] Pharmaceutical preparations can be formulated for intravenous administration. The pharmaceutical compositions can be in a form suitable for parenteral injection as a sterile suspension, solution or emulsion in oily or aqueous vehicles, and can contain formulatory agents such as suspending, stabilizing and/or dispersing agents. Pharmaceutical formulations for parenteral administration include aqueous solutions of a compound of the present disclosure in water-soluble form. Suspensions of a compound of the present disclosure can be prepared as oily injection suspensions. Suitable lipophilic solvents or vehicles include fatty oils such as sesame oil, or synthetic fatty acid esters, such as ethyl oleate or triglycerides, or liposomes. The suspension can also contain suitable stabilizers or agents which increase the solubility of the compounds to allow for the preparation of highly concentrated solutions. Alternatively, the active ingredient can be in powder form for constitution with a suitable vehicle, e.g., sterile pyrogen-free water, before use.

[0126] A compound of the present disclosure can be administered topically and can be formulated into a variety of topically administrable compositions, such as solutions, suspensions, lotions, gels, pastes, medicated sticks, balms, creams, and ointments. Such pharmaceutical compositions can contain solubilizers, stabilizers, tonicity enhancing agents, buffers and preservatives.

[0127] A compound of the present disclosure can also be formulated in rectal compositions such as enemas, rectal gels, rectal foams, rectal aerosols, suppositories, jelly suppositories, or retention enemas, containing conventional suppository bases such as cocoa butter or other glycerides, as well as synthetic polymers such as polyvinylpyrrolidone, and PEG. In suppository forms of the compositions, a low-melting wax such as a mixture of fatty acid glycerides, optionally in combination with cocoa butter, can be melted.

[0128] In practicing the methods of treatment or use provided herein, therapeutically-effective amounts of the compounds described herein are administered in pharmaceutical compositions to a subject having a disease or condition to be treated. In some embodiments, the subject is a mammal such as a human. A therapeutically-effective amount can vary widely depending on the severity of the disease, the age and relative health of the subject, the potency of the compounds used, and other factors. The compounds can be used singly or in combination with one or more therapeutic agents as components of mixtures.

[0129] Pharmaceutical compositions can be formulated using one or more physiologically-acceptable carriers comprising excipients and auxiliaries, which facilitate processing of a compound of the present disclosure into preparations that can be used pharmaceutically. Formulation can be modified depending upon the route of administration chosen. Pharmaceutical compositions comprising a compound described herein can be manufactured, for example, by mixing, dissolving, emulsifying, encapsulating, entrapping, or compression processes.

[0130] The pharmaceutical compositions can include at least one pharmaceutically-acceptable carrier, diluent, or excipient and compounds described herein as free-base or pharmaceutically-acceptable salt form. Pharmaceutical compositions can contain solubilizers, stabilizers, tonicity enhancing agents, buffers and preservatives.

[0131] Methods for the preparation of compositions comprising the compounds described herein include formulating the compounds with one or more inert, pharmaceutically-acceptable excipients or carriers to form a solid, semi-solid, or liquid composition. Solid compositions include, for example, powders, tablets, dispersible granules, capsules, and cachets. Liquid compositions include, for example, solutions in which a compound is dissolved, emulsions comprising a compound, or a solution containing liposomes, micelles, or nanoparticles comprising a compound as disclosed herein. Semi-solid compositions include, for example, gels, suspensions and creams. The compositions can be in liquid solutions or suspensions, solid forms suitable for solution or suspension in a liquid prior to use, or as emulsions. These compositions can also contain minor amounts of nontoxic, auxiliary substances, such as wetting or emulsifying agents, pH buffering agents, and other pharmaceutically-acceptable additives.

[0132] Non-limiting examples of dosage forms suitable for use in the invention include liquid, powder, gel, nanosuspension, nanoparticle, microgel, aqueous or oily suspensions, emulsion, and any combination thereof.

[0133] Non-limiting examples of pharmaceutically-acceptable excipients suitable for use in the invention include binding agents, disintegrating agents, anti-adherents, anti-static agents, surfactants, anti-oxidants, coating agents, coloring agents, plasticizers, preservatives, suspending agents, emulsifying agents, anti-microbial agents, spheronization agents, and any combination thereof.

[0134] A composition of the invention can be, for example, an immediate release form or a controlled release formulation. An immediate release formulation can be formulated to allow the compounds to act rapidly. Non-limiting examples of immediate release formulations include readily dissolvable formulations. A controlled release formulation can be a pharmaceutical formulation that has been adapted such that release rates and release profiles of the active agent can be matched to physiological and chronotherapeutic requirements or, alternatively, has been formulated to effect release of an active agent at a programmed rate. Non-limiting examples of controlled release formulations include granules, delayed release granules, hydrogels (e.g., of synthetic or natural origin), other gelling agents (e.g., gel-forming dietary fibers), matrix-based formulations (e.g., formulations comprising a polymeric material having at least one active ingredient dispersed through), granules within a matrix, polymeric mixtures, and granular masses.

[0135] In some, a controlled release formulation is a delayed release form. A delayed release form can be formulated to delay a compound's action for an extended period of time. A delayed release form can be formulated to delay the release of an effective dose of one or more compounds, for example, for about 4, about 8, about 12, about 16, or about 24 hours.

[0136] A controlled release formulation can be a sustained release form. A sustained release form can be formulated to sustain, for example, the compound's action over an extended period of time. A sustained release form can be formulated to provide an effective dose of any compound described herein (e.g., provide a physiologically-effective blood profile) over about 4, about 8, about 12, about 16 or about 24 hours.

[0137] Non-limiting examples of pharmaceutically-acceptable excipients can be found, for example, in Remington: The Science and Practice of Pharmacy, Nineteenth Ed (Easton, Pa.: Mack Publishing Company, 1995); Hoover, John E., Remington's Pharmaceutical Sciences, Mack Publishing Co., Easton, Pa. 1975; Liberman, H. A. and Lachman, L., Eds., Pharmaceutical Dosage Forms, Marcel Decker, New York, N.Y., 1980; and Pharmaceutical Dosage Forms and Drug Delivery Systems, Seventh Ed. (Lippincott Williams & Wilkins 1999), each of which is incorporated by reference in its entirety.

[0138] Multiple therapeutic agents can be administered in any order or simultaneously. In some embodiments, a compound of the invention is administered in combination with, before, or after an antibiotic. If simultaneously, the multiple therapeutic agents can be provided in a single, unified form, or in multiple forms, for example, as multiple separate pills. The agents can be packed together or separately, in a single package or in a plurality of packages. One or all of the therapeutic agents can be given in multiple doses. If not simultaneous, the timing between the multiple doses can vary to as much as about a month.

[0139] Therapeutic agents described herein can be administered before, during, or after the occurrence of a disease or condition, and the timing of administering the composition containing a therapeutic agent can vary. For example, the compositions can be used as a prophylactic and can be administered continuously to subjects with a propensity to conditions or diseases in order to lessen a likelihood of the occurrence of the disease or condition. The compositions can be administered to a subject during or as soon as possible after the onset of the symptoms. The administration of the therapeutic agents can be initiated within the first 48 hours of the onset of the symptoms, within the first 24 hours of the onset of the symptoms, within the first 6 hours of the onset of the symptoms, or within 3 hours of the onset of the symptoms. The initial administration can be via any route practical, such as by any route described herein using any formulation described herein. A therapeutic agent can be administered as soon as is practicable after the onset of a disease or condition is detected or suspected, and for a length of time necessary for the treatment of the disease, such as, for example, from about 1 month to about 3 months. The length of treatment can vary for each subject.

[0140] Pharmaceutical compositions described herein can be in unit dosage forms suitable for single administration of precise dosages. In unit dosage form, the formulation is divided into unit doses containing appropriate quantities of one or more compounds. The unit dosage can be in the form of a package containing discrete quantities of the formulation. Non-limiting examples are packaged injectables, vials, or ampoules. Aqueous suspension compositions can be packaged in single-dose non-reclosable containers. Multiple-dose reclosable containers can be used, for example, in combination with or without a preservative. Formulations for injection can be presented in unit dosage form, for example, in ampoules, or in multi-dose containers with a preservative.

[0141] Pharmaceutical compositions provided herein, can be administered in conjunction with other therapies, for example, chemotherapy, radiation, surgery, anti-inflammatory agents, and selected vitamins. The other agents can be administered prior to, after, or concomitantly with the pharmaceutical compositions.

[0142] Depending on the intended mode of administration, the pharmaceutical compositions can be in the form of solid, semi-solid or liquid dosage forms, such as, for example, tablets, suppositories, pills, capsules, powders, liquids, suspensions, lotions, creams, or gels, for example, in unit dosage form suitable for single administration of a precise dosage.

[0143] For solid compositions, nontoxic solid carriers include, for example, pharmaceutical grades of mannitol, lactose, starch, magnesium stearate, sodium saccharin, talc, cellulose, glucose, sucrose, and magnesium carbonate.

[0144] Non-limiting examples of dosage forms suitable for use in the disclosure include liquid, elixir, nanosuspension, aqueous or oily suspensions, drops, syrups, and any combination thereof. Non-limiting examples of pharmaceutically-acceptable excipients suitable for use in the disclosure include granulating agents, binding agents, lubricating agents, disintegrating agents, sweetening agents, glidants, anti-adherents, anti-static agents, surfactants, anti-oxidants, gums, coating agents, coloring agents, flavoring agents, coating agents, plasticizers, preservatives, suspending agents, emulsifying agents, plant cellulosic material and spheronization agents, and any combination thereof.

[0145] Compositions of the invention can be packaged as a kit. In some embodiments, a kit includes written instructions on the administration/use of the composition. The written material can be, for example, a label. The written material can suggest conditions methods of administration. The instructions provide the subject and the supervising physician with the best guidance for achieving the optimal clinical outcome from the administration of the therapy. The written material can be a label. In some embodiments, the label can be approved by a regulatory agency, for example the U.S. Food and Drug Administration (FDA), the European Medicines Agency (EMA), or other regulatory agencies.

### Diseases

[0146] The compounds of the present disclosure can be applied to various autoimmune or immune-related diseases or conditions, for example to treat such diseases or conditions. For example, the present disclosure provides a method for treating a condition, the method comprising administering to a subject in need thereof a therapeutically-effective amount of a compound of the present disclosure. In some embodiments, the compound administered to the subject in need thereof comprises a first moiety that binds IL-2R and a second moiety that binds ST2, wherein the first moiety is covalently linked via a linker to a first Fc domain and the second moiety is covalently linked via a linker to a second Fc domain, and the first and second Fc domains are covalently linked, and further wherein the first and second Fc domains are deficient in effector functions.

[0147] Autoimmune diseases include diseases that affect organs such as the heart, kidney, liver, lung, reproductive organs, digestive system, or skin. Autoimmune diseases include diseases that affect glands, including the endocrine, adrenal, thyroid, salivary and exocrine glands, and the pancreas. Autoimmune diseases can also be multi-glandular. Autoimmune diseases can target one or more tissues, for example connective tissue, muscle, or blood. Autoimmune diseases can target the nervous system or eyes, ears or vascular system. Autoimmune diseases can also be systemic, affecting multiple organs, tissues and/or systems. In some embodiments, an immune-related disease or condition is an inflammatory disease or condition. In some embodiments, an inflammatory disease or condition is one which involves inflamed muscle, visceral adipose, colon, and/or lung tissue.

[0148] In certain embodiments, the autoimmune disease is selected from the group consisting of Graft-vs-Host Disease, Pemphigus Vulgaris, Systemic Lupus Erythematosus, Scleroderma, Ulcerative Colitis, Crohn's Disease, Psoriasis, Type 1 Diabetes, Multiple Sclerosis, Amyotrophic Lateral Sclerosis, Alopecia Areata, Uveitis, Neuromyelitis Optica, and Duchenne Muscular Dystrophy.

[0149] In some embodiments, the compounds of the present disclosure treat diseases affecting muscle tissue, for example, inflammatory myopathies, muscular dystrophies, muscle diseases with immune system involvement, and muscle diseases involving inflammation.

[0150] Inflammatory myopathies are diseases that typically involve inflammation of the muscles and associated symptoms, such as muscle weakness. The muscle weakness can be progressive. Symptoms associated with inflammatory myopathies (e.g., dermatomyositis) can include, for example, muscle weakness (e.g. proximal muscle weakness), skin rash, fatigue after walking or standing, tripping or falling, dysphagia, dysphonia, difficulty breathing, muscle pain, tender muscles, weight loss, low-grade fever, inflamed lungs, light sensitivity, calcium deposits (calcinosis) under the skin or in the muscle, and biological concomitants of inflammatory myopathies.

[0151] Inflammatory myopathies can be caused by allergic reactions, other diseases, exposure to a drug or toxin, or exposure to an infectious agent, or can be idiopathic (no known cause). The inflammatory myopathy can be an acute inflammatory myopathy or a chronic inflammatory myopathy. Inflammatory myopathies can affect both adults and children (e.g., juvenile dermatomyositis). Inflammatory myopathies can include symptoms that affect other organs or systems of the body, such as the skin, lungs, heart, eyes, and gastrointestinal system. In some embodiments, the inflammatory myopathy is a chronic inflammatory myopathy (e.g., dermatomyositis, polymyositis, or inclusion body myositis).

[0152] In some embodiments, the inflammatory myopathy can be caused by an allergic reaction, another disease (e.g., cancer or a connective tissue disease), exposure to a toxic substance, a medicine, or an infectious agent (e.g., a virus). In some embodiments, the inflammatory myopathy is associated with lupus, rheumatoid arthritis, or systemic sclerosis. In some embodiments, the inflammatory myopathy is idiopathic. In some embodiments, the inflammatory myopathy is selected from polymyositis, dermatomyositis, inclusion body myositis, and immune-mediated necrotizing myopathy. In some embodiments, the inflammatory myopathy is dermatomyositis.

[0153] Biological concomitants of inflammatory myopathies (e.g., dermatomyositis) include, for example, altered (for example, increased) levels of cytokines (for example, Type I interferons (such as IFN-α and/or IFN-β), interleukins (such as IL-6, IL-10, IL-15, IL-17 and IL-18), and TNF-α), TGF-β, B-cell activating factor (BAFF), and overexpression of IFN inducible genes (for example, Type I IFN inducible genes). Other biological concomitants of inflammatory myopathies can include, for example, an increased erythrocyte sedimentation rate (ESR) and/or elevated level of creatine kinase. Further biological concomitants of inflammatory myopathies can include autoantibodies, for example, anti-synthetase autoantibodies (for example, anti-Jo1 antibodies), anti-signal recognition particle antibodies (anti-SRP), anti-Mi-2 antibodies, anti-p155 antibodies, anti-PM/Sci antibodies, and anti-RNP antibodies.

[0154] The muscular dystrophies are a group of diverse, heritable neuromuscular disorders that represent a group of devastating neuromuscular diseases characterized by primary or secondary skeletal muscle involvement. Examples of muscular dystrophies include, but are not limited to, Duchenne muscular dystrophy, Beckers muscular dystrophy, Limb-Girdle muscular dystrophy, Facioscapulohumeral muscular dystrophy, Fukuyama congenital muscular dystrophy, and merosin-deficient congenital muscular dystrophy. The most common form of muscular dystrophy is Duchenne Muscular Dystrophy, (DMD). DMD is an X-linked recessive disorder characterized by a mutation in the gene that codes for dystrophin. Most patients die before age 30 due to respiratory or cardiac failure. Beckers muscular dystrophy (also known as benign pseudohypertrophic muscular dystrophy) is related to DMD in that both result from a mutation in the dystrophin gene. An organism suffering from DMD does not produce functional dystrophin. Thus, DMD is much more severe than BMD.

### Subjects

[0155] The compounds of the present disclosure are administered to a subject in need thereof, such as a vertebrate. In some embodiments the subject is a mouse, rat, rabbit, dog, cat, horse, sheep, cow, monkey, cynomolgus monkey, or human. Subjects can be, for example, elderly adults, adults, adolescents, pre-adolescents, children, toddlers, and infants. In some embodiments, the subject is an animal model of an inflammatory myopathy. In some embodiments, the subject is a human with an inflammatory myopathy, or a human at risk of developing an inflammatory myopathy. In some embodiments, the subject has a family history of inflammatory myopathy. In some embodiments the subject carries a gene associated with an inflammatory myopathy. In some embodiments the subject is positive for a biomarker associated with an inflammatory myopathy. In some embodiments, the subject has been diagnosed with an inflammatory myopathy. In some embodiments, the subject has one or more signs or symptoms associated with an inflammatory myopathy, e.g., one or more of the symptoms described herein.

[0156] In some embodiments the subject is an animal model of a muscular dystrophy. In some embodiments the subject is a human with a muscular dystrophy, or a human at risk of developing a muscular dystrophy. In some embodiments, the subject has a family history of muscular dystrophy. In some embodiments the subject carries a gene associated with a muscular dystrophy. In some embodiments the subject is positive for a biomarker associated with a muscular dystrophy. In some embodiments, the subject has been diagnosed with a muscular dystrophy. In some embodiments, the subject has one or more signs or symptoms associated with a muscular dystrophy, e.g., one or more of the symptoms described herein.

### Dosing

[0157] Pharmaceutical compositions described herein can be in unit dosage forms suitable for single administration of precise dosages. In unit dosage form, the formulation is divided into unit doses containing appropriate quantities of one or more compounds. The unit dosage can be in the form of a package containing discrete quantities of the formulation. Non-limiting examples are liquids in vials or ampoules. Aqueous suspension compositions can be packaged in single-dose non-reclosable containers. Multiple-dose reclosable containers can be used, for example, in combination with a preservative. Formulations for parenteral injection can be presented in unit dosage form, for example, in ampoules, or in multi dose containers with a preservative.

[0158] A compound described herein can be present in a composition in a range of from about 0.5 μg to about 7000 μg, from about 1 μg to about 1000 μg, from about 1 μg to about 250 μg, from about 1 μg to about 25 μg, from about 5 μg to about 50 μg, from about 0.5 μg to about 15 μg, or from about 0.5 μg to about 10 μg per dose.

[0159] A compound described herein can be present in a composition in an amount of about 0.5 μg, about 1 μg, about 2 μg, about 3 μg, about 4 μg, about 5 μg, about 6 μg, about 7 μg, about 8 μg, about 9 μg, about 10 μg, about 11 μg, about 12 μg, about 13 μg, about 14 μg, about 15 μg, about 16 μg, about 17 μg, about 18 μg, about 19 μg, about 20 μg, about 21 μg, about 22 μg, about 23 μg, about 24 μg, about 25 μg, about 26 μg, about 27 μg, about 28 μg, about 29 μg, about 30 μg, about 31 μg, about 32 μg, about 33 μg, about 34 μg, about 35 μg, about 36 μg, about 37 μg, about 38 μg, about 39 μg, about 40 μg, about 41 μg, about 42 μg, about 43 μg, about 44 μg, about 45 μg, about 46 μg, about 47 μg, about 48 μg, about 49 μg, about 50 μg, about 55 μg, about 60 μg, about 65 μg, about 70 μg, about 75 μg, about 80 μg, about 85 μg, about 90 μg, about 95 μg, about 100 μg, about 125 μg, about 150 μg, about 175 μg, about 200 μg, about 250 μg, about 300 μg, about 350 μg, about 400 μg, about 450 μg, about 500 μg, about 550 μg, about 600 μg, about 650 μg, about 700 μg, about 750 μg, about 800 μg, about 850 μg, about 900 μg, about 950 μg, about 1000 μg, about 1050 μg, about 1100 μg, about 1150 μg, about 1200 μg, about 1250 μg, about 1300 μg, about 1350 μg, about 1400 μg, about 1450 μg, about 1500 μg, about 1550 μg, about 1600 μg, about 1650 μg, about 1700 μg, about 1750 μg, about 1800 μg, about 1850 μg, about 1900 μg, about 1950 μg, about 2000 μg, about 2500 μg, about 3000 μg, about 3500 μg, about 4000 μg, about 4500 μg, about 5000 μg, about 5500 μg, about 6000 μg, about 6500 μg, about 7000 μg, about 7500 μg, about 8000 μg, about 9000 μg, about 10,000 μg (10 mg), about 11 mg, about 12 mg, about 13 mg, about 14 mg, about 15 mg, about 16 mg, about 17 mg, about 18 mg, about 19 mg, about 20 mg, about 21 mg, about 22 mg, about 23 mg, about 24 mg, about 25 mg, about 26 mg, about 27 mg, about 28 mg, about 29 mg, about 30 mg, about 31 mg, about 32 mg, about 33 mg, about 34 mg, about 35 mg, about 36 mg, about 37 mg, about 38 mg, about 39 mg, or about 40 mg. Any of these values may be used to define a range for the amount of the compound in the composition. For example, the compound may be present in a composition in the range of from about 0.5 μg to about 40 mg, from about 500 μg to about 10 mg, or from about 50 μg to about 5 mg.

[0160] In some embodiments, a dose can be expressed in terms of an amount of the drug divided by the mass of the subject, for example, micrograms or milligrams of drug per kilograms of subject body mass. In some embodiments, the compound is administered at a dose of about 0.5 μg/kg, about 1 μg/kg, about 2 μg/kg, about 3 μg/kg, about 4 μg/kg, about 5 μg/kg, about 6 μg/kg, about 7 μg/kg, about 8 μg/kg, about 9 μg/kg, about 10 μg/kg, about 11 μg/kg, about 12 μg/kg, about 13 μg, about 14 μg/kg, about 15 μg/kg, about 16 μg/kg, about 17 μg/kg, about 18 μg/kg, about 19 μg/kg, about 20 μg/kg, about 25 μg/kg, about 30 μg/kg, about 35 μg/kg, about 40 μg/kg, about 45 μg/kg, about 50 μg/kg, about 55 μg/kg, about 60 μg/kg, about 65 μg/kg, about 70 μg/kg, about 75 μg/kg, about 80 μg/kg, about 85 μg/kg, about 90 μg/kg, about 95 μg/kg, about 100 μg/kg, about 125 μg/kg, about 150 μg/kg, about 175 μg/kg, about 200 μg/kg, about 250 μg/kg, about 300 μg/kg, about 350 μg/kg, about 400 μg/kg, about 450 μg/kg, about 500 μg/kg, about 550 μg/kg, about 600 μg/kg, about 650 μg/kg, about 700 μg/kg, about 750 μg/kg, about 800 μg/kg, about 850 μg/kg, about 900 μg/kg, about 950 μg/kg, about 1000 μg/kg, about 1050 μg/kg, about 1100 μg/kg, about 1150 μg/kg, about 1200 μg/kg, about 1250 μg/kg, about 1300 μg/kg, about 1350 μg/kg, about 1400 μg/kg, about 1450 μg/kg, about 1500 μg/kg, about 1550 μg/kg, about 1600 μg/kg, about 1650 μg/kg, about 1700 μg/kg, about 1750 μg/kg, about 1800 μg/kg, about 1850 μg/kg, about 1900 μg/kg, about 1950 μg/kg, about 2000 μg/kg, about 2500 μg/kg, about 3000 μg/kg, about 3500 μg/kg, about 4000 μg/kg, about 4500 μg/kg, or about 5000 μg/kg. Any of these values may be used to define a range for the dose of the compound. For example, in some embodiments, a compound is administered at a dose ranging from about 0.5 μg/kg to about 250 μg/kg, 1 μg/kg to about 200 μg/kg, 5 μg/kg to about 150 μg/kg, about 10 μg/kg to about 100 μg/kg, about 10 μg/kg to about 50 μg/kg, about 15 μg/kg to about 35 μg/kg, or about 0.5 μg/kg to about 5000 μg/kg.

[0161] The disclosed compounds can be administered at any interval desired. For example, the compound can be administered once a week, 2 times a week, 3 times a week, 4 times a week, 5 times a week, 6 times a week, 7 times a week, 8 times a week, 9 times a week, or 10 times a week. The interval between daily dosing can be any hourly interval, for example, every hour, every 2 hours, every 3 hours, every 4 hours, every 5 hours, every 6 hours, every 7 hours, every 8 hours, every 9 hours, every 10 hours, every 11 hours, or every 12 hours. The compound can be administered once every week, once every 2 weeks, once every 3 weeks, once every 4 weeks, once every 5 weeks, once every 6 weeks, once every 7 weeks, or once every 8 weeks. The administration of the compound can have irregular dosing schedules to accommodate either the person administering the compound or the subject receiving the compound. As such, the compound can be administered, for example, once a day, twice a day, or three times a day.

[0162] The amount administered can be the same amount in each dose or the dosage can vary. For example, a first amount can be dosed in the morning and a second amount can be administered in the evening. A subject could receive a high first dose and lower subsequent doses. The dose can be adjusted up or down depending on improvement in symptoms or markers of the disease, or development of adverse reactions.

[0163] Non-limiting examples of pharmaceutically-acceptable carriers include saline, Ringer's solution and dextrose solution. Liquid carriers can be used in preparing solutions, suspensions, and emulsions. A compound described herein can be dissolved or suspended in a pharmaceutically-acceptable liquid carrier such as water, an organic solvent, or a mixture of both, or pharmaceutically-acceptable oils or fats. The liquid carrier can contain other suitable pharmaceutical additives such as solubilizers, emulsifiers, buffers, preservatives, sweeteners, flavoring agents, suspending agents, thickening agents, colors, viscosity regulators, stabilizers, and osmo-regulators. Examples of liquid carriers for parenteral administration include water, alcohols (including monohydric alcohols and polyhydric alcohols, e.g., glycols) and derivatives thereof, and oils (e.g., fractionated coconut oil and arachis oil). For parenteral administration, the carrier can be an oily ester such as ethyl oleate or isopropyl myristate. Sterile liquid carriers are used in sterile liquid form compositions for parenteral administration. The pH of the solution is can be from about 5 to about 8, for example, from about 7 to about 7.5.

[0164] In some embodiments, treatment with a molecule of the present disclosure is better tolerated than is treatment with a wildtype IL-2 polypeptide. In some embodiments, treatment with a therapeutically-effective dose of a molecule of the present disclosure causes fewer incidents of diarrhea relative to treatment with IL2(C125S). In some embodiments, treatment with a therapeutically-effective amount of a molecule of the present disclosure does not cause capillary leak syndrome. In some embodiments, treatment with a therapeutically-effective amount of a molecule of the present disclosure does not cause decreased neutrophil activity or increased risk of infection.

[0165] The compounds of the present disclosure have high, moderate, or low affinity for the IL-2 receptor. The compounds of the present disclosure have high, moderate, or low affinity for ST2. A compound that has moderate or low affinity for IL2R and ST2 individually can have high avidity when both receptors are present on a cell. A compound of the present disclosure has a dissociation constant (Kd) of, for example, from about 1 pmol to about 1 mmol, from about 10 pmol to about 1 mmol, from about 100 pmol to about 1 mmol, from about 1 μmol to about 1 mmol, from about 10 μmol to about 1 mmol, from about 1 μmol to about 100 μmol, from about 1 μmol to about 500 μmol, from about 200 μmol to about 800 μmol, from about 10 μmol to about 100 μmole, or from about 500 μmole to about 1 mmol for binding to either ST2 or IL2R individually. A compound of the present disclosure can have a lower apparent Kd when binding to both ST2 and IL-2R, for example, less than 95%, less than 90%, less than 85%, less than 80%, less than 75%, less than 70%, less than 65%, less than 60%, less than 55%, less than 50%, less than 45%, less than 40%, less than 35%, less than 30%, less than 25%, less than 20%, less than 15%, less than 10%, less than 5%, less than 4%, less than 3%, less than 2%, or less than 1% of an individual Kd.

### Pharmacokinetics

[0166] A dose can be modulated to achieve a desired pharmacokinetic (PK) or pharmacodynamics profile, such as a desired or effective blood profile, as described herein.

[0167] Pharmacokinetic and pharmacodynamic data can be obtained by various experimental techniques. Appropriate pharmacokinetic and pharmacodynamic profile components describing a particular composition can vary due to variations in drug metabolism in human subjects. Pharmacokinetic and pharmacodynamic profiles can be based on the determination of the mean parameters of a group of subjects. The group of subjects includes any reasonable number of subjects suitable for determining a representative mean, for example, 5 subjects, 10 subjects, 15 subjects, 20 subjects, 25 subjects, 30 subjects, 35 subjects, or more. The mean is determined, for example, by calculating the average of all subject's measurements for each parameter measured. A dose can be modulated to achieve a desired pharmacokinetic or pharmacodynamics profile, such as a desired or effective blood profile, as described herein.

[0168] The pharmacodynamic parameters can be any parameters suitable for describing compositions of the invention. For example, the pharmacodynamic profile can be obtained at a time after dosing of, for example, about zero minutes, about 1 minute, about 2 minutes, about 3 minutes, about 4 minutes, about 5 minutes, about 6 minutes, about 7 minutes, about 8 minutes, about 9 minutes, about 10 minutes, about 11 minutes, about 12 minutes, about 13 minutes, about 14 minutes, about 15 minutes, about 16 minutes, about 17 minutes, about 18 minutes, about 19 minutes, about 20 minutes, about 21 minutes, about 22 minutes, about 23 minutes, about 24 minutes, about 25 minutes, about 26 minutes, about 27 minutes, about 28 minutes, about 29 minutes, about 30 minutes, about 31 minutes, about 32 minutes, about 33 minutes, about 34 minutes, about 35 minutes, about 36 minutes, about 37 minutes, about 38 minutes, about 39 minutes, about 40 minutes, about 41 minutes, about 42 minutes, about 43 minutes, about 44 minutes, about 45 minutes, about 46 minutes, about 47 minutes, about 48 minutes, about 49 minutes, about 50 minutes, about 51 minutes, about 52 minutes, about 53 minutes, about 54 minutes, about 55 minutes, about 56 minutes, about 57 minutes, about 58 minutes, about 59 minutes, about 60 minutes, about zero hours, about 0.5 hours, about 1 hour, about 1.5 hours, about 2 hours, about 2.5 hours, about 3 hours, about 3.5 hours, about 4 hours, about 4.5 hours, about 5 hours, about 5.5 hours, about 6 hours, about 6.5 hours, about 7 hours, about 7.5 hours, about 8 hours, about 8.5 hours, about 9 hours, about 9.5 hours, about 10 hours, about 10.5 hours, about 11 hours, about 11.5 hours, about 12 hours, about 12.5 hours, about 13 hours, about 13.5 hours, about 14 hours, about 14.5 hours, about 15 hours, about 15.5 hours, about 16 hours, about 16.5 hours, about 17 hours, about 17.5 hours, about 18 hours, about 18.5 hours, about 19 hours, about 19.5 hours, about 20 hours, about 20.5 hours, about 21 hours, about 21.5 hours, about 22 hours, about 22.5 hours, about 23 hours, about 23.5 hours, about 24 hours, about 2 days, about 3 days, about 4 days, about 5 days, about 6 days, about 7 days, about 8 days, about 9 days, about 10 days, about 11 days, about 12 days, about 13 days, or about 14 days.

[0169] The pharmacokinetic parameters can be any parameters suitable for describing a compound. The Cₘₐₓ can be, for example, not less than about 1 ng/mL; not less than about 5 ng/mL; not less than about 10 ng/mL; not less than about 15 ng/mL; not less than about 20 ng/mL; not less than about 25 ng/mL; not less than about 50 ng/mL; not less than about 75 ng/mL; not less than about 100 ng/mL; not less than about 200 ng/mL; not less than about 300 ng/mL; not less than about 400 ng/mL; not less than about 500 ng/mL; not less than about 600 ng/mL; not less than about 700 ng/mL; not less than about 800 ng/mL; not less than about 900 ng/mL; not less than about 1000 ng/mL; not less than about 1250 ng/mL; not less than about 1500 ng/mL; not less than about 1750 ng/mL; not less than about 2000 ng/mL; not less than about 2500 ng/mL; or any other Cₘₐₓ appropriate for describing a pharmacokinetic profile of a compound described herein. The Cₘₐₓ can be, for example, about 5 to about 10,000 ng/mL, about 50 to about 10,000 ng/mL, about 500 to about 10,000 ng/mL, about 5000 to about 10,000 ng/mL, about 1000 to about 5,000 ng/mL, about 1000 to about 3,000 ng/mL, about 5,000 to about 8,000 ng/mL or about 500 to about 1000 ng/mL in blood when administered by intravenous injection, for example, at 50 μg/kg. The Cₘₐₓ can be, for example, about 5 to about 50 ng/mL, about 50 to about 500 ng/mL, about 100 to about 250 ng/mL, about 1000 to about 5000 ng/mL, about 1000 to about 2000 ng/mL, about 2000 to about 5000 ng/mL, about 5000 to about 10000 ng/mL or about 5000 to about 7000 ng/mL in blood when administered by subcutaneous injection, for example, at 50 μg/kg. The Cmax can depend on the dose of compound received. The dose received can be 50 μg/kg, 100 μg/kg, 200 μg/kg, 250 μg/kg, 300 μg/kg, 400 μg/kg, 500 μg/kg, 600 μg/kg, 700 μg/kg, 800 μg/kg, 900 μg/kg, or 1000 μg/kg.

[0170] The Tₘₐₓ of a compound described herein can be, for example, not greater than about 0.5 hours, not greater than about 1 hours, not greater than about 1.5 hours, not greater than about 2 hours, not greater than about 2.5 hours, not greater than about 3 hours, not greater than about 3.5 hours, not greater than about 4 hours, not greater than about 4.5 hours, not greater than about 5 hours, not greater than about 5.5 hours, not greater than about 6 hours, not greater than about 6.5 hours, not greater than about 7 hours, not greater than about 7.5 hours, not greater than about 8 hours, not greater than about 8.5 hours, not greater than about 9 hours, not greater than about 9.5 hours, not greater than about 10 hours, not greater than about 10.5 hours, not greater than about 11 hours, not greater than about 11.5 hours, not greater than about 12 hours, not greater than about 12.5 hours, not greater than about 13 hours, not greater than about 13.5 hours, not greater than about 14 hours, not greater than about 14.5 hours, not greater than about 15 hours, not greater than about 15.5 hours, not greater than about 16 hours, not greater than about 16.5 hours, not greater than about 17 hours, not greater than about 17.5 hours, not greater than about 18 hours, not greater than about 18.5 hours, not greater than about 19 hours, not greater than about 19.5 hours, not greater than about 20 hours, or any other Tₘₐₓ appropriate for describing a pharmacokinetic profile of a compound described herein. The Tₘₐₓ can be, for example, about 0.1 hours to about 24 hours; about 0.1 hours to about 0.5 hours; about 0.5 hours to about 1 hour; about 1 hour to about 1.5 hours; about 1.5 hours to about 2 hour; about 2 hours to about 2.5 hours; about 2.5 hours to about 3 hours; about 3 hours to about 3.5 hours; about 3.5 hours to about 4 hours; about 4 hours to about 4.5 hours; about 4.5 hours to about 5 hours; about 5 hours to about 5.5 hours; about 5.5 hours to about 6 hours; about 6 hours to about 6.5 hours; about 6.5 hours to about 7 hours; about 7 hours to about 7.5 hours; about 7.5 hours to about 8 hours; about 8 hours to about 8.5 hours; about 8.5 hours to about 9 hours; about 9 hours to about 9.5 hours; about 9.5 hours to about 10 hours; about 10 hours to about 10.5 hours; about 10.5 hours to about 11 hours; about 11 hours to about 11.5 hours; about 11.5 hours to about 12 hours; about 12 hours to about 12.5 hours; about 12.5 hours to about 13 hours; about 13 hours to about 13.5 hours; about 13.5 hours to about 14 hours; about 14 hours to about 14.5 hours; about 14.5 hours to about 15 hours; about 15 hours to about 15.5 hours; about 15.5 hours to about 16 hours; about 16 hours to about 16.5 hours; about 16.5 hours to about 17 hours; about 17 hours to about 17.5 hours; about 17.5 hours to about 18 hours; about 18 hours to about 18.5 hours; about 18.5 hours to about 19 hours; about 19 hours to about 19.5 hours; about 19.5 hours to about 20 hours; about 20 hours to about 20.5 hours; about 20.5 hours to about 21 hours; about 21 hours to about 21.5 hours; about 21.5 hours to about 22 hours; about 22 hours to about 22.5 hours; about 22.5 hours to about 23 hours; about 23 hours to about 23.5 hours; or about 23.5 hours to about 24 hours.

[0171] The AUC_{(0-inf)} (also called AUC_{(0-∞)}) or AUC₍ₗₐₛₜ₎ of a compound described herein can be, for example, not less than about 1 ng·hr/mL, not less than about 5 ng·hr/mL, not less than about 10 ng·hr/mL, not less than about 20 ng·hr/mL, not less than about 30 ng·hr/mL, not less than about 40 ng·hr/mL, not less than about 50 ng·hr/mL, not less than about 100 ng·hr/mL, not less than about 150 ng·hr/mL, not less than about 200 ng·hr/mL, not less than about 250 ng·hr/mL, not less than about 300 ng·hr/mL, not less than about 350 ng·hr/mL, not less than about 400 ng·hr/mL, not less than about 450 ng·hr/mL, not less than about 500 ng·hr/mL, not less than about 600 ng·hr/mL, not less than about 700 ng·hr/mL, not less than about 800 ng·hr/mL, not less than about 900 ng·hr/mL, not less than about 1000 ng·hr/mL, not less than about 1250 ng·hr/mL, not less than about 1500 ng·hr/mL, not less than about 1750 ng·hr/mL, not less than about 2000 ng·hr/mL, not less than about 2500 ng·hr/mL, not less than about 3000 ng·hr/mL, not less than about 3500 ng·hr/mL, not less than about 4000 ng·hr/mL, not less than about 5000 ng·hr/mL, not less than about 6000 ng·hr/mL, not less than about 7000 ng·hr/mL, not less than about 8000 ng·hr/mL, not less than about 9000 ng·hr/mL, not less than about 10,000 ng·hr/mL, not less than about 11,000 ng·hr/mL, not less than about 12,000 ng·hr/mL, not less than about 13,000 ng·hr/mL, not less than about 14,000 ng·hr/mL, not less than about 15,000 ng·hr/mL, not less than about 16,000 ng·hr/mL, not less than about 17,000 ng·hr/mL, not less than about 18,000 ng·hr/mL, not less than about 19,000 ng·hr/mL, not less than about 20,000 ng·hr/mL, or any other AUC_{(0-inf)} appropriate for describing a pharmacokinetic profile of a compound described herein. The AUC_{(0-inf)} of a compound can be, for example, about 1 ng·hr/mL to about 10,000 ng·hr/mL; about 1 ng·hr/mL to about 10 ng·hr/mL; about 10 ng·hr/mL to about 25 ng·hr/mL; about 25 ng·hr/mL to about 50 ng·hr/mL; about 50 ng·hr/mL to about 100 ng·hr/mL; about 100 ng·hr/mL to about 200 ng·hr/mL; about 200 ng·hr/mL to about 300 ng·hr/mL; about 300 ng·hr/mL to about 400 ng·hr/mL; about 400 ng·hr/mL to about 500 ng·hr/mL; about 500 ng·hr/mL to about 600 ng·hr/mL; about 600 ng·hr/mL to about 700 ng·hr/mL; about 700 ng·hr/mL to about 800 ng·hr/mL; about 800 ng·hr/mL to about 900 ng·hr/mL; about 900 ng·hr/mL to about 1,000 ng·hr/mL; about 1,000 ng·hr/mL to about 1,250 ng·hr/mL; about 1,250 ng·hr/mL to about 1,500 ng·hr/mL; about 1,500 ng·hr/mL to about 1,750 ng·hr/mL; about 1,750 ng·hr/mL to about 2,000 ng·hr/mL; about 2,000 ng·hr/mL to about 2,500 ng·hr/mL; about 2,500 ng·hr/mL to about 3,000 ng·hr/mL; about 3,000 ng·hr/mL to about 3,500 ng·hr/mL; about 3,500 ng·hr/mL to about 4,000 ng·hr/mL; about 4,000 ng·hr/mL to about 4,500 ng·hr/mL; about 4,500 ng·hr/mL to about 5,000 ng·hr/mL; about 5,000 ng·hr/mL to about 5,500 ng·hr/mL; about 5,500 ng·hr/mL to about 6,000 ng·hr/mL; about 6,000 ng·hr/mL to about 6,500 ng·hr/mL; about 6,500 ng·hr/mL to about 7,000 ng·hr/mL; about 7,000 ng·hr/mL to about 7,500 ng·hr/mL; about 7,500 ng·hr/mL to about 8,000 ng·hr/mL; about 8,000 ng·hr/mL to about 8,500 ng·hr/mL; about 8,500 ng·hr/mL to about 9,000 ng·hr/mL; about 9,000 ng·hr/mL to about 9,500 ng·hr/mL; about 9,500 ng·hr/mL to about 10,000 ng·hr/mL; about 10,000 ng·hr/mL to about 10,500 ng·hr/mL; about 10,500 ng·hr/mL to about 11,000 ng·hr/mL; about 11,000 ng·hr/mL to about 11,500 ng·hr/mL; about 11,500 ng·hr/mL to about 12,000 ng·hr/mL; about 12,000 ng·hr/mL to about 12,500 ng·hr/mL; about 12,500 ng·hr/mL to about 13,000 ng·hr/mL; about 13,000 ng·hr/mL to about 13,500 ng·hr/mL; about 13,500 ng·hr/mL to about 14,000 ng·hr/mL; about 14,000 ng·hr/mL to about 14,500 ng·hr/mL; about 14,500 ng·hr/mL to about 15,000 ng·hr/mL; about 15,000 ng·hr/mL to about 15,500 ng·hr/mL; about 15,500 ng·hr/mL to about 16,000 ng·hr/mL; about 16,000 ng·hr/mL to about 16,500 ng·hr/mL; about 16,500 ng·hr/mL to about 17,000 ng·hr/mL; about 17,000 ng·hr/mL to about 17,500 ng·hr/mL; about 17,500 ng·hr/mL to about 18,000 ng·hr/mL; about 18,000 ng·hr/mL to about 18,500 ng·hr/mL; about 18,500 ng·hr/mL to about 19,000 ng·hr/mL; about 19,000 ng·hr/mL to about 19,500 ng·hr/mL; or about 19,500 ng·hr/mL to about 20,000 ng·hr/mL. For example, the AUC_{(0-inf)} of a compound can be about 8500 ng·hr/mL when administered intravenously at 50 μg/kg or about 4000 ng·hr/mL when administered subcutaneously at 50 μg/kg.

[0172] The plasma concentration of a compound described herein can be, for example, not less than about 1 ng/mL, not less than about 5 ng/mL, not less than about 10 ng/mL, not less than about 15 ng/mL, not less than about 20 ng/mL, not less than about 25 ng/mL, not less than about 50 ng/mL, not less than about 75 ng/mL, not less than about 100 ng/mL, not less than about 150 ng/mL, not less than about 200 ng/mL, not less than about 300 ng/mL, not less than about 400 ng/mL, not less than about 500 ng/mL, not less than about 600 ng/mL, not less than about 700 ng/mL, not less than about 800 ng/mL, not less than about 900 ng/mL, not less than about 1000 ng/mL, not less than about 1200 ng/mL, or any other plasma concentration of a compound described herein. The plasma concentration can be, for example, about 1 ng/mL to about 2,000 ng/mL; about 1 ng/mL to about 5 ng/mL; about 5 ng/mL to about 10 ng/mL; about 10 ng/mL to about 25 ng/mL; about 25 ng/mL to about 50 ng/mL; about 50 ng/mL to about 75 ng/mL; about 75 ng/mL to about 100 ng/mL; about 100 ng/mL to about 150 ng/mL; about 150 ng/mL to about 200 ng/mL; about 200 ng/mL to about 250 ng/mL; about 250 ng/mL to about 300 ng/mL; about 300 ng/mL to about 350 ng/mL; about 350 ng/mL to about 400 ng/mL; about 400 ng/mL to about 450 ng/mL; about 450 ng/mL to about 500 ng/mL; about 500 ng/mL to about 600 ng/mL; about 600 ng/mL to about 700 ng/mL; about 700 ng/mL to about 800 ng/mL; about 800 ng/mL to about 900 ng/mL; about 900 ng/mL to about 1,000 ng/mL; about 1,000 ng/mL to about 1,100 ng/mL; about 1,100 ng/mL to about 1,200 ng/mL; about 1,200 ng/mL to about 1,300 ng/mL; about 1,300 ng/mL to about 1,400 ng/mL; about 1,400 ng/mL to about 1,500 ng/mL; about 1,500 ng/mL to about 1,600 ng/mL; about 1,600 ng/mL to about 1,700 ng/mL; about 1,700 ng/mL to about 1,800 ng/mL; about 1,800 ng/mL to about 1,900 ng/mL; or about 1,900 ng/mL to about 2,000 ng/mL.

[0173] The pharmacodynamic parameters can be any parameters suitable for describing compositions of the disclosure. For example, the pharmacodynamic profile can exhibit increased Treg cell counts for, for example, about 24 hours, about 48 hours, about 72 hours, or 1 week.

[0174] Non-limiting examples of pharmacodynamic and pharmacokinetic parameters that can be calculated for a compound that is administered with the methods of the invention include: a) the amount of drug administered, which can be represented as a dose D; b) the dosing interval, which can be represented as τ; c) the apparent volume in which a drug is distributed, which can be represented as a volume of distribution V_{d}, where V_{d}=D/C₀; d) the amount of drug in a given volume of plasma, which can be represented as concentration C₀ or Cₛₛ, where C₀ or Cₛₛ=D/Vd and can be represented as a mean plasma concentration over a plurality of samples; e) the half-life of a drug t_{1/2}, where t_{1/2}=ln(2)/kₑ; f) the rate at which a drug is removed from the body kₑ, where kₑ=ln(2)/t_{1/2}=CL/V_{d}; g) the rate of infusion required to balance the equation Kᵢₙ, where Kᵢₙ=Cₛₛ·CL; h) the integral of the concentration-time curve after administration of a single dose, which can be represented as AUC_{0-∞}, wherein ∫₀^{∞} C dt, or in steady-state, which can be represented as AUCτ_{, ss}, wherein ∫ₜ^{t+π} C dt; i) the volume of plasma cleared of the drug per unit time, which can be represented as CL (clearance), wherein CL=V_{d}·kₑ=D/AUC; j) the systemically available fraction of a drug, which can be represented as f, where

$$f = \frac{AUCpo \cdot Div}{AUCiv \cdot Dpo} ; k )$$

the peak plasma concentration of a drug after administration Cₘₐₓ; l) the time taken by a drug to reach Cₘₐₓ, tₘₐₓ; m) the lowest concentration that a drug reaches before the next dose is administered Cₘᵢₙ; and n) the peak trough fluctuation within one dosing interval at steady state, which can be represented as % PTF=100.

$$\frac{( {C}_{max , ss} - {C}_{min , ss} )}{{C}_{av , ss}} where {C}_{av , ss} = \frac{{AUC}_{τ , ss}}{τ} .$$

[0175] The compounds of the present disclosure can have high stability when administered to a subject. The administered compound can have a physiological half-life of greater than about 6 hrs, greater than about 7 hrs, greater than about 8 hrs, greater than about 9 hrs, greater than about 10 hrs, greater than about 11 hrs, greater than about 12 hrs, greater than about 13 hrs, greater than about 14 hrs, greater than about 15 hrs, greater than about 16 hrs, greater than about 17 hrs, greater than about 18 hrs, greater than about 19 hrs, greater than about 20 hrs, greater than about 21 hrs, greater than about 22 hrs, greater than about 23 hrs, greater than about 24 hrs, greater than about 25 hrs, greater than about 26 hrs, greater than about 27 hrs, greater than about 28 hrs, greater than about 29 hrs, greater than about 30 hrs, greater than about 31 hrs, greater than about 32 hrs, greater than about 33 hrs, greater than about 34 hrs, greater than about 35 hrs, greater than about 36 hrs, greater than about 37 hrs, greater than about 38 hrs, greater than about 39 hrs, greater than about 40 hrs, greater than about 41 hrs, greater than about 42 hrs, greater than about 43 hrs, greater than about 44 hrs, greater than about 45 hrs, greater than about 46 hrs, greater than about 47 hrs, greater than about 48 hrs, greater than about 49 hrs, greater than about 50 hrs, greater than about 51 hrs, greater than about 52 hrs, greater than about 53 hrs, greater than about 54 hrs, greater than about 55 hrs, greater than about 56 hrs, greater than about 57 hrs, greater than about 58 hrs, greater than about 59 hrs, greater than about 60 hrs, greater than about 61 hrs, greater than about 62 hrs, greater than about 63 hrs, or greater than about 64 hrs.

[0176] The half-life of a compound of the present disclosure can vary based on the dose administered. For example, the half-life of the compound when administered in a dose of 50 μg/kg can be shorter than the half-life of the same compound when administered at a dose of 100 μg/kg or 250 μg/kg. The half-life of the compound can vary based on the administration route used. The half-life of the compound can be longer if the compound is administered subcutaneously rather than intravenously. For example the half-life of a compound delivered subcutaneously can be between about 15 hrs and about 25 hrs, while the half-life of the compound delivered intravenously can be between about 5 and about 15 hrs. In some embodiments, the half-life of a compound when administered intravenously at 50 μg/kg is about 6 hrs to about 14 hrs, about 7 hrs to about 13 hours, about 8 hrs to about 12 hrs, or about 9 hrs to about 11 hrs. In some embodiments, the half-life of a compound when administered intravenously at 50 μg/kg is about 5 hrs, about 6 hrs, about 7 hrs, about 8 hrs, about 9 hrs, about 10 hrs, about 11 hrs, about 12 hrs, about 13 hrs, about 14 hrs, or about 15 hrs. In some embodiments, the half-life of a compound when administered subcutaneously at 50 μg/kg is about 15 hrs to about 27 hrs, about 16 hrs to about 26 hours, about 17 hrs to about 25 hrs, about 18 hrs to about 24 hrs, about 19 hrs to about 23 hrs, or about 20 hrs to about 22 hrs. In some embodiments, the half-life of a compound when administered subcutaneously at 50 μg/kg is about 10 hrs, about 11 hrs, about 12 hrs, about 13 hrs, about 14 hrs, about 15 hrs, about 16 hrs, about 17 hrs, about 18 hrs, about 19 hrs, about 21 hrs, about 22 hrs, about 23 hrs, about 24 hrs, about 25 hrs, about 26 hrs, about 27 hrs, about 28 hrs, about 29 hrs, or about 30 hrs. The clearance of the compound from the blood can be faster for a compound delivered intravenously than for a compound delivered subcutaneously.

### Production of Dimeric Proteins: Heterodimers and Homodimers

[0177] In some embodiments, a compound of the present disclosure is a heterodimer, for example, a heterodimer comprising an IL2R-binding moiety (e.g. IL-2 or an IL-2 variant) that is part of a first fusion protein and an ST2-binding moiety (e.g. an antibody that binds ST2, or an antigen-binding fragment thereof) that is part of a second fusion protein. In some embodiments, each of the first and second fusion proteins comprises an IgG Fc domain, for example an IgG1 Fc domain or variant thereof. Heterodimers can be produced by expressing the two constituent recombinant proteins individually, purifying them, and combining them in vitro to form disulfide-linked heterodimers. Heterodimeric Fc fusion proteins can also be made in a single cell transfected with two constituent cDNA constructs using the “knobs into holes” approach. By this strategy, mutations are introduced into the CH2-CH3 interface between the two Fc polypeptide chains that prevent the formation of homodimers, yet form complementary interfaces that promote the formation of heterodimers. In this manner, heterodimeric Fc fusion proteins can be formed within host cells expressing the recombinant proteins and secreted as heterodimeric proteins. Below are two examples such Fc constructs on a human IgG1 background. The mutated residues T366Y and Y407T are shown in bold and underlined, and the N297A residue is underlined.

(A) IgG1 Fc (N297A; T366Y):
(SEQ ID NO: 8)
DKTHTCPPCPAPELLGGPSVFLFPPKPKDTLMISRTPEVTCVVVDVSHEDP
EVKFNWYVDGVEVHNAKTKPREEQYASTYRVVSVLTVLHQDWLNGKEYKCK
VSNKALPAPIEKTISKAKGQPREPQVYTLPPSRDELTKNQVSLYCLVKGFY
PSDIAVEWESNGQPENNYKTTPPVLDSDGSFFLYSKLTVDKSRWQQGNVFS
CSVMHEALHNHYTQKSLSLSPG
(B) IgG1 Fc (N297A; Y407T):
(SEQ ID NO: 9)
DKTHTCPPCPAPELLGGPSVFLFPPKPKDTLMISRTPEVTCVVVDVSHEDP
EVKFNWYVDGVEVHNAKTKPREEQYASTYRVVSVLTVLHQDWLNGKEYKCK
VSNKALPAPIEKTISKAKGQPREPQVYTLPPSRDELTKNQVSLTCLVKGFY
PSDIAVEWESNGQPENNYKTTPPVLDSDGSFFLTSKLTVDKSRWQQGNVFS
CSVMHEALHNHYTQKSLSLSPG

[0178] The two different binding moieties, for instance, IL-2 and an ST2 antibody or fragment thereof, can be appended to the Fc sequences (A) and (B), respectively, to construct a heterodimeric protein.

[0179] In some embodiments, the first fusion protein comprises an IgG1 Fc domain comprising the mutations T350V, L351Y, F405A and Y407V (e.g. SEQ ID NO: 4); and the second fusion protein comprises the mutations T350V, T366L, K392L and T394W (e.g. SEQ ID NO: 5). Such mutations have been reported to improve proper pairing and stability (Von Kreudenstein et al., 2013, mAbs 5: 646-654; WO 2014082179 A1). Exemplary human IgG1 Fc domain sequences are shown below with the N297A mutation underlined, and the T350V, L351Y, F405A, Y407V, T350V, T366L, K392L and T394W mutations shown in bold and underlined.

(A) IgG1 Fc (N297A, T350V, L351Y, F405A and Y407V)
(SEQ ID NO: 4)
DKTHTCPPCPAPELLGGPSVFLFPPKPKDTLMISRTPEVTCVVVDVSHEDP
EVKFNWYVDGVEVHNAKTKPREEQYASTYRVVSVLTVLHQDWLNGKEYKCK
VSNKALPAPIEKTISKAKGQPREPQVYVYPPSRDELTKNQVSLTCLVKGFY
PSDIAVEWESNGQPENNYKTTPPVLDSDGSFALVSKLTVDKSRWQQGNVFS
CSVMHEALHNHYTQKSLSLSPG
(B) IgG1 Fc (N297A, T350V, T366L, K392L and T394W)
(SEQ ID NO: 5)
DKTHTCPPCPAPELLGGPSVFLFPPKPKDTLMISRTPEVTCVVVDVSHEDP
EVKFNWYVDGVEVHNAKTKPREEQYASTYRVVSVLTVLHQDWLNGKEYKCK
VSNKALPAPIEKTISKAKGQPREPQVYVLPPSRDELTKNQVSLLCLVKGFY
PSDIAVEWESNGQPENNYLTWPPVLDSDGSFFLYSKLTVDKSRWQQGNVFS
CSVMHEALHNHYTQKSLSLSPG

[0180] Exemplary heterodimers are shown in FIGS. 3A, 3B, 3C, 3D and 3E.

[0181] In some embodiments, a compound of the present disclosure is a homodimer, for example, a homodimer comprising two identical fusion proteins, each containing an IL2R-binding moiety (e.g. IL-2 or an IL-2 variant) and an ST2-binding moiety (e.g. an antibody that binds ST2, or an antigen-binding fragment thereof). In some embodiments, each of the two identical fusion proteins comprises an IgG Fc domain, for example an IgG1 Fc domain or variant thereof. In a particular embodiment, the IgG1 Fc domain is a human IgG1 Fc domain comprising the N297A mutation (e.g. SEQ ID NO: 7). Exemplary homodimers are shown in FIG. 3A.

[0182] The IL2R-binding moiety (e.g. IL-2 or an IL-2 variant) and the ST2-binding moiety (e.g. an antibody that binds ST2, or an antigen-binding fragment thereof) may be attached to the N-terminus or the C-terminus of the IgG Fe domain, either directly or through a peptide linker (e.g. a G₄S linker). Various combinations of an IL2R-binding moiety and an ST2-binding moiety may be used. In some embodiments, the dimeric protein comprises a first fusion protein comprising an IL2R-binding moiety N-terminal to the IgG Fc domain, and a second fusion protein comprising an ST2-binding moiety C-terminal to the IgG Fc domain. In some embodiments, the first fusion protein comprises an IL2R-binding moiety N-terminal to the IgG Fc domain, and the second fusion protein comprises an ST2-binding moiety N-terminal to the IgG Fc domain (see, for example, FIG. 3D). In some embodiments, the first fusion protein comprises an IL2R-binding moiety C-terminal to the IgG Fc domain, and the second fusion protein comprises an ST2-binding moiety N-terminal to the IgG Fc domain (see, for example, FIG. 3C). In some embodiments, the first fusion protein comprises an IL2R-binding moiety C-terminal to the IgG Fc domain, and the second fusion protein comprises an ST2-binding moiety C-terminal to the IgG Fc domain. In some embodiments, the first fusion protein comprises an ST2-binding moiety N terminal to the IgG Fc domain and an IL2R-binding moiety C-terminal to the IgG Fc domain, and the second fusion protein comprises an ST2-binding moiety N-terminal to the IgG Fc domain (see, for example, FIG. 3B). In some embodiments, the first fusion protein comprises an ST2-binding moiety N terminal to the IgG Fc domain and an IL2R-binding moiety C-terminal to the IgG Fc domain, and the second fusion protein comprises an IL2R-binding moiety N-terminal to the IgG Fc domain. In some embodiments, both the first fusion protein and the second fusion protein comprise an ST2-binding moiety N terminal to the IgG Fc domain and an IL2R-binding moiety C-terminal to the IgG Fc domain (see, for example, FIG. 3A). In some embodiments, both the first fusion protein and the second fusion protein comprise an IL2R-binding moiety N terminal to the IgG Fc domain and an ST2-binding moiety C-terminal to the IgG Fc domain. In some embodiments, the first fusion protein comprises an IL2R-binding moiety C-terminal to the IgG Fc domain, and the second fusion protein comprises an ST2-binding moiety N-terminal to the IgG Fc domain and an IL2R-binding moiety C-terminal to the IgG Fc domain (see, for example, FIG. 3E).

[0183] In some embodiments, the dimeric protein comprises at least one IL2R-binding moiety (e.g. IL-2 or an IL-2 variant) and at least one ST2-binding moiety (e.g. an antibody that binds ST2, or an antigen-binding fragment thereof). In some embodiments, the dimeric protein comprises only one IL2R-binding moiety. In some embodiments, the dimeric protein comprises only one ST2-binding moiety.

[0184] In some embodiments, the dimeric protein comprises at least two IL2R-binding moieties. For example, in some embodiments, the first and second fusion protein each contain at least one IL2R-binding moiety. See, for example, FIGS. 3A and 3E. In some embodiments, the dimeric protein comprises at least two ST2-binding moieties. For example, in some embodiments, the first and second fusion protein each contain at least one ST2-binding moiety. See, for example, FIGS. 3A and 3B.

[0185] In any of the embodiments described herein, the IL2R-binding moiety and the ST2-binding moiety may be attached to the IgG Fc domain via a peptide linker (e.g. a G₄S linker). The dimeric protein may contain, 1, 2, 3, 4 or more peptide linkers. In some embodiments, the dimeric protein comprises at least 1, 2, 3 or 4 peptide linkers.

[0186] In some embodiments, the IL2R-binding moiety and/or the ST2-binding moiety is fused directly to the IgG Fc domain through a peptide bond, i.e. without the addition of a peptide linker between the binding moiety and the IgG Fc domain. In some embodiment, the dimeric protein does not comprise a peptide linker.

[0187] In some embodiments, the first fusion protein of the dimeric protein is configured so that the C-terminus of the IL-2 binding moiety (e.g. a human IL-2 protein domain or a variant thereof) is fused through a peptide bond to the N-terminus of a first peptide linker domain; and the N-terminus of the first IgG Fc protein domain is fused through a peptide bond to the C-terminus of the first peptide linker domain. In some embodiments, the second fusion protein of the dimeric protein is configured so that the C-terminus of a second IgG Fc protein domain is fused through a peptide bond to the N-terminus of a second peptide linker domain; and the N-terminus of a protein domain that binds to ST2 is fused through a peptide bond to the C-terminus of the second peptide linker domain. In some embodiments, the second fusion protein of the dimeric protein is configured so that the C-terminus of the ST2 binding moiety is fused through a peptide bond to the N-terminus of a second peptide linker domain; and the N-terminus of the second IgG Fc protein domain is fused through a peptide bond to the C-terminus of the second peptide linker domain. In some embodiments, the dimeric protein comprises a fusion protein having at least 90%, at least 95%, at least 96%, at least 97%, at least 98%, or at least 99% sequence identity to the amino acid sequence of SEQ ID NO: 10. In some embodiments, the dimeric protein comprises a fusion protein having at least 90%, at least 95%, at least 96%, at least 97%, at least 98%, or at least 99% sequence identity to the amino acid sequence of SEQ ID NO: 11. In some embodiments, the dimeric protein comprises a fusion protein having at least 90%, at least 95%, at least 96%, at least 97%, at least 98%, or at least 99% sequence identity to the amino acid sequence of SEQ ID NO: 12. In some embodiments, the dimeric protein comprises a fusion protein having at least 90%, at least 95%, at least 96%, at least 97%, at least 98%, or at least 99% sequence identity to the amino acid sequence of SEQ ID NO: 13. In some embodiments, the dimeric protein comprises a fusion protein having at least 90%, at least 95%, at least 96%, at least 97%, at least 98%, or at least 99% sequence identity to the amino acid sequence of SEQ ID NO: 14. In some embodiments, the dimeric protein comprises a fusion protein having at least 90%, at least 95%, at least 96%, at least 97%, at least 98%, or at least 99% sequence identity to the amino acid sequence of SEQ ID NO: 15. In some embodiments, the dimeric protein comprises a fusion protein having at least 90%, at least 95%, at least 96%, at least 97%, at least 98%, or at least 99% sequence identity to the amino acid sequence of SEQ ID NO: 18.

[0188] In some embodiments, the dimeric protein further comprises light chains of an ST2 antibody. For example, in some embodiments, the fusion protein comprises a heavy chain of an ST2 antibody (e.g. a human IgG1 ST2 antibody heavy chain listed in Table 1), and the dimeric protein further comprises a corresponding light chain (e.g. a light chain listed in Table 1) of the ST2 antibody. The light chain may be linked to the heavy chain by a disulfide bond. In some embodiments, the dimeric protein comprises only one ST2 antibody, e.g. an antigen binding fragment (Fab) comprising one heavy chain and one light chain. In some embodiments, the dimeric protein comprises two ST2 antibodies, e.g. two Fab fragments each comprising a heavy chain and a light chain.

Description of Sequences in Sequence Listing

| SEQ | |
|---|---|
| ID NO: | Description |
| 1 | Human IL-2 comprising the N88R and C125S mutations |
| 2 | Wildtype human IL-2 |
| 3 | Human IL-2 comprising the T3A, N88R, and C125S |
| | mutations |
| 4 | Human IgG1 Fc (N297A, T350V, L351Y, F405A, Y407V) |
| 5 | Human IgG1 Fc (N297A, T350V, T366L, K392L, T394W) |
| 6 | peptide linker GGGGSGGGGSGGGGS (G4S)₃ |
| 7 | Human IgG1 Fc moiety (N297A) |
| 8 | Human IgG1 Fc (T366Y) |
| 9 | Human IgG1 Fc (Y407T) |
| 10 | IL-2 (N88R, C125)/(G4S)₃ linker/IgG1 Fc (N297A, T350V, |
| | T366L, K392L, T394W) fusion protein FIG. 4B |
| 11 | IgG1 Fc (N297A, T350V, T366L, K392L, T394W)/(G4S)₃ |
| | linker/IL-2 (N88R, C125) fusion protein FIG. 4C |
| 12 | Ab2HeavyIL2vC |
| 13 | Ab4HeavyIL2vC |
| 14 | Ab2HeavyIL2vC(W) |
| 15 | Ab4HeavyIL2vC(W) |
| 16 | Ab2Heavy(V) |
| 17 | Ab4Heavy(V) |
| 18 | IL2vCFc(V) |
| 19 | Ab2Kappa |
| 20 | Ab4Kappa |
| 21 | GGGGS peptide linker |
| 22 | ST2 Antibody 1 heavy chain nucleic acid |
| 23 | ST2 Antibody 1 heavy chain amino acid |
| 24 | ST2 Antibody 2 heavy chain nucleic acid |
| 25 | ST2 Antibody 2 heavy chain amino acid |
| 26 | ST2 Antibody 3 heavy chain nucleic acid |
| 27 | ST2 Antibody 3 heavy chain amino acid |
| 28 | ST2 Antibody 4 heavy chain nucleic acid |
| 29 | ST2 Antibody 4 heavy chain amino acid |
| 30 | ST2 Antibody 5 heavy chain nucleic acid |
| 31 | ST2 Antibody 5 heavy chain amino acid |
| 32 | ST2 Antibody 6 heavy chain nucleic acid |
| 33 | ST2 Antibody 6 heavy chain amino acid |
| 34 | ST2 Antibody 7 heavy chain nucleic acid |
| 35 | ST2 Antibody 7 heavy chain amino acid |
| 36 | ST2 Antibody 8 heavy chain nucleic acid |
| 37 | ST2 Antibody 8 heavy chain amino acid |
| 38 | ST2 Antibody 9 heavy chain nucleic acid |
| 39 | ST2 Antibody 9 heavy chain amino acid |
| 40 | ST2 Antibody 10 heavy chain nucleic acid |
| 41 | ST2 Antibody 10 heavy chain amino acid |
| 42 | ST2 Antibody 11 heavy chain nucleic acid |
| 43 | ST2 Antibody 11 heavy chain amino acid |
| 44 | ST2 Antibody 12 heavy chain nucleic acid |
| 45 | ST2 Antibody 12 heavy chain amino acid |
| 46 | ST2 Antibody 13 heavy chain nucleic acid |
| 47 | ST2 Antibody 13 heavy chain amino acid |
| 48 | ST2 Antibody 14 heavy chain nucleic acid |
| 48 | ST2 Antibody 14 heavy chain amino acid |
| 50 | ST2 Antibody 15 heavy chain nucleic acid |
| 51 | ST2 Antibody 15 heavy chain amino acid |
| 52 | ST2 Antibody 16 heavy chain nucleic acid |
| 53 | ST2 Antibody 16 heavy chain amino acid |
| 54 | ST2 Antibody 17 heavy chain nucleic acid |
| 55 | ST2 Antibody 17 heavy chain amino acid |
| 56 | ST2 Antibody 18 heavy chain nucleic acid |
| 57 | ST2 Antibody 18 heavy chain amino acid |
| 58 | ST2 Antibody 19 heavy chain nucleic acid |
| 59 | ST2 Antibody 19 heavy chain amino acid |
| 60 | ST2 Antibody 20 heavy chain nucleic acid |
| 61 | ST2 Antibody 20 heavy chain amino acid |
| 62 | ST2 Antibody 21 heavy chain nucleic acid |
| 63 | ST2 Antibody 21 heavy chain amino acid |
| 64 | ST2 Antibody 22 heavy chain nucleic acid |
| 65 | ST2 Antibody 22 heavy chain amino acid |
| 66 | ST2 Antibody 23 heavy chain nucleic acid |
| 67 | ST2 Antibody 23 heavy chain amino acid |
| 68 | ST2 Antibody 24 heavy chain nucleic acid |
| 69 | ST2 Antibody 24 heavy chain amino acid |
| 70 | ST2 Antibody 25heavy chain nucleic acid |
| 71 | ST2 Antibody 25 heavy chain amino acid |
| 72 | ST2 Antibody 26 heavy chain nucleic acid |
| 73 | ST2 Antibody 26 heavy chain amino acid |
| 74 | ST2 Antibody 27 heavy chain nucleic acid |
| 75 | ST2 Antibody 27 heavy chain amino acid |
| 76 | ST2 Antibody 28 heavy chain nucleic acid |
| 77 | ST2 Antibody 28 heavy chain amino acid |
| 78 | ST2 Antibody 29 heavy chain nucleic acid |
| 79 | ST2 Antibody 29 heavy chain amino acid |
| 80 | ST2 Antibody 30 heavy chain nucleic acid |
| 81 | ST2 Antibody 30 heavy chain amino acid |
| 82 | ST2 Antibody 31 heavy chain nucleic acid |
| 83 | ST2 Antibody 31 heavy chain amino acid |
| 84 | ST2 Antibody 32 heavy chain nucleic acid |
| 85 | ST2 Antibody 32 heavy chain amino acid |
| 86 | ST2 Antibody 33 heavy chain nucleic acid |
| 87 | ST2 Antibody 33 heavy chain amino acid |
| 88 | ST2 Antibody34 heavy chain nucleic acid |
| 89 | ST2 Antibody 34 heavy chain amino acid |
| 90 | ST2 Antibody 35 heavy chain nucleic acid |
| 91 | ST2 Antibody 35 heavy chain amino acid |
| 92 | ST2 Antibody 36 heavy chain nucleic acid |
| 93 | ST2 Antibody 36 heavy chain amino acid |
| 94 | ST2 Antibody 37 heavy chain nucleic acid |
| 95 | ST2 Antibody 37 heavy chain amino acid |
| 96 | ST2 Antibody 38 heavy chain nucleic acid |
| 97 | ST2 Antibody 38 heavy chain amino acid |
| 98 | ST2 Antibody 39 heavy chain nucleic acid |
| 99 | ST2 Antibody 39 heavy chain amino acid |
| 100 | ST2 Antibody 40 heavy chain nucleic acid |
| 101 | ST2 Antibody 40 heavy chain amino acid |
| 102 | ST2 Antibody 41 heavy chain nucleic acid |
| 103 | ST2 Antibody 41 heavy chain amino acid |
| 104 | ST2 Antibody 42 heavy chain nucleic acid |
| 105 | ST2 Antibody 42 heavy chain amino acid |
| 106 | ST2 Antibody 43 heavy chain nucleic acid |
| 107 | ST2 Antibody 43 heavy chain amino acid |
| 108 | ST2 Antibody 44 heavy chain nucleic acid |
| 109 | ST2 Antibody 44 heavy chain amino acid |
| 110 | ST2 Antibody 45 heavy chain nucleic acid |
| 111 | ST2 Antibody 45 heavy chain amino acid |
| 112 | ST2 Antibody 46 heavy chain nucleic acid |
| 113 | ST2 Antibody 46 heavy chain amino acid |
| 114 | ST2 Antibody 47 heavy chain nucleic acid |
| 115 | ST2 Antibody 47 heavy chain amino acid |
| 116 | ST2 Antibody 48 heavy chain nucleic acid |
| 117 | ST2 Antibody 48 heavy chain amino acid |
| 118 | ST2 Antibody 49 heavy chain nucleic acid |
| 119 | ST2 Antibody 49 heavy chain amino acid |
| 120 | ST2 Antibody 50 heavy chain nucleic acid |
| 121 | ST2 Antibody 50 heavy chain amino acid |
| 122 | ST2 Antibody 51 heavy chain nucleic acid |
| 123 | ST2 Antibody 51 heavy chain amino acid |
| 124 | ST2 Antibody 52 heavy chain nucleic acid |
| 125 | ST2 Antibody 52 heavy chain amino acid |
| 126 | ST2 Antibody 53 heavy chain nucleic acid |
| 127 | ST2 Antibody 53 heavy chain amino acid |
| 128 | ST2 Antibody 54 heavy chain nucleic acid |
| 129 | ST2 Antibody 54 heavy chain amino acid |
| 130 | ST2 Antibody 55 heavy chain nucleic acid |
| 131 | ST2 Antibody 55 heavy chain amino acid |
| 132 | ST2 Antibody 56 heavy chain nucleic acid |
| 133 | ST2 Antibody 56 heavy chain amino acid |
| 134 | ST2 Antibody 57 heavy chain nucleic acid |
| 135 | ST2 Antibody 57 heavy chain amino acid |
| 136 | ST2 Antibody 58 heavy chain nucleic acid |
| 137 | ST2 Antibody 58 heavy chain amino acid |
| 138 | ST2 Antibody 59 heavy chain nucleic acid |
| 139 | ST2 Antibody 59 heavy chain amino acid |
| 140 | ST2 Antibody 60 heavy chain nucleic acid |
| 141 | ST2 Antibody 60 heavy chain amino acid |
| 142 | ST2 Antibody 61 heavy chain nucleic acid |
| 143 | ST2 Antibody 61 heavy chain amino acid |
| 144 | ST2 Antibody 62 heavy chain nucleic acid |
| 145 | ST2 Antibody 62 heavy chain amino acid |
| 146 | ST2 Antibody 63 heavy chain nucleic acid |
| 147 | ST2 Antibody 63 heavy chain amino acid |
| 148 | ST2 Antibody 64 heavy chain nucleic acid |
| 149 | ST2 Antibody 64 heavy chain amino acid |
| 150 | ST2 Antibody 65 heavy chain nucleic acid |
| 151 | ST2 Antibody 65 heavy chain amino acid |
| 152 | ST2 Antibody 66 heavy chain nucleic acid |
| 153 | ST2 Antibody 66 heavy chain amino acid |
| 154 | ST2 Antibody 67 heavy chain nucleic acid |
| 155 | ST2 Antibody 67 heavy chain amino acid |
| 156 | ST2 Antibody 68 heavy chain nucleic acid |
| 157 | ST2 Antibody 68 heavy chain amino acid |
| 158 | ST2 Antibody 69 heavy chain nucleic acid |
| 159 | ST2 Antibody 69 heavy chain amino acid |
| 160 | ST2 Antibody 70 heavy chain nucleic acid |
| 161 | ST2 Antibody 70 heavy chain amino acid |
| 162 | ST2 Antibody 71 heavy chain nucleic acid |
| 163 | ST2 Antibody 71 heavy chain amino acid |
| 164 | ST2 Antibody 72 heavy chain nucleic acid |
| 165 | ST2 Antibody 72 heavy chain amino acid |
| 166 | ST2 Antibody 73 heavy chain nucleic acid |
| 167 | ST2 Antibody 73 heavy chain amino acid |
| 168 | ST2 Antibody 74 heavy chain nucleic acid |
| 169 | ST2 Antibody 74 heavy chain amino acid |
| 170 | ST2 Antibody 75 heavy chain nucleic acid |
| 171 | ST2 Antibody 75 heavy chain amino acid |
| 172 | ST2 Antibody 76 heavy chain nucleic acid |
| 173 | ST2 Antibody 76 heavy chain amino acid |
| 174 | ST2 Antibody 77 heavy chain nucleic acid |
| 175 | ST2 Antibody 77 heavy chain amino acid |
| 176 | ST2 Antibody 78 heavy chain nucleic acid |
| 177 | ST2 Antibody 78 heavy chain amino acid |
| 178 | ST2 Antibody 79 heavy chain nucleic acid |
| 179 | ST2 Antibody 79 heavy chain amino acid |
| 180 | ST2 Antibody 80 heavy chain nucleic acid |
| 181 | ST2 Antibody 80 heavy chain amino acid |
| 182 | ST2 Antibody 81 heavy chain nucleic acid |
| 183 | ST2 Antibody 81 heavy chain amino acid |
| 184 | ST2 Antibody 82 heavy chain nucleic acid |
| 185 | ST2 Antibody 82 heavy chain amino acid |
| 186 | ST2 Antibody 83 heavy chain nucleic acid |
| 187 | ST2 Antibody 83 heavy chain amino acid |
| 188 | ST2 Antibody 84 heavy chain nucleic acid |
| 189 | ST2 Antibody 84 heavy chain amino acid |
| 190 | ST2 Antibody 85 heavy chain nucleic acid |
| 191 | ST2 Antibody 85 heavy chain amino acid |
| 192 | ST2 Antibody 86 heavy chain nucleic acid |
| 193 | ST2 Antibody 86 heavy chain amino acid |
| 194 | ST2 Antibody 87 heavy chain nucleic acid |
| 195 | ST2 Antibody 87 heavy chain amino acid |
| 196 | ST2 Antibody 88 heavy chain nucleic acid |
| 197 | ST2 Antibody 88 heavy chain amino acid |
| 198 | ST2 Antibody 89 heavy chain nucleic acid |
| 199 | ST2 Antibody 89 heavy chain amino acid |
| 200 | ST2 Antibody 90 heavy chain nucleic acid |
| 201 | ST2 Antibody 90 heavy chain amino acid |
| 202 | ST2 Antibody 91 heavy chain nucleic acid |
| 203 | ST2 Antibody 91 heavy chain amino acid |
| 204 | ST2 Antibody 92 heavy chain nucleic acid |
| 205 | ST2 Antibody 92 heavy chain amino acid |
| 206 | ST2 Antibody 93 heavy chain nucleic acid |
| 207 | ST2 Antibody 93 heavy chain amino acid |
| 208 | ST2 Antibody 94 heavy chain nucleic acid |
| 209 | ST2 Antibody 94 heavy chain amino acid |
| 210 | ST2 Antibody 95 heavy chain nucleic acid |
| 211 | ST2 Antibody 95 heavy chain amino acid |
| 212 | ST2 Antibody 96 heavy chain nucleic acid |
| 213 | ST2 Antibody 96 heavy chain amino acid |
| 214 | ST2 Antibody 97 heavy chain nucleic acid |
| 215 | ST2 Antibody 97 heavy chain amino acid |
| 216 | ST2 Antibody 98 heavy chain nucleic acid |
| 217 | ST2 Antibody 98 heavy chain amino acid |
| 218 | ST2 Antibody 99 heavy chain nucleic acid |
| 219 | ST2 Antibody 99 heavy chain amino acid |
| 220 | ST2 Antibody 100 heavy chain nucleic acid |
| 221 | ST2 Antibody 100 heavy chain amino acid |
| 222 | ST2 Antibody 101 heavy chain nucleic acid |
| 223 | ST2 Antibody 101 heavy chain amino acid |
| 224 | ST2 Antibody 102 heavy chain nucleic acid |
| 225 | ST2 Antibody 102 heavy chain amino acid |
| 226 | ST2 Antibody 103 heavy chain nucleic acid |
| 227 | ST2 Antibody 103 heavy chain amino acid |
| 228 | ST2 Antibody 104 heavy chain nucleic acid |
| 229 | ST2 Antibody 104 heavy chain amino acid |
| 230 | ST2 Antibody 105 heavy chain nucleic acid |
| 231 | ST2 Antibody 105 heavy chain amino acid |
| 232 | ST2 Antibody 106 heavy chain nucleic acid |
| 233 | ST2 Antibody 106 heavy chain amino acid |
| 234 | ST2 Antibody 107 heavy chain nucleic acid |
| 235 | ST2 Antibody 107 heavy chain amino acid |
| 236 | ST2 Antibody 108 heavy chain nucleic acid |
| 237 | ST2 Antibody 108 heavy chain amino acid |
| 238 | ST2 Antibody 109 heavy chain nucleic acid |
| 239 | ST2 Antibody 109 heavy chain amino acid |
| 240 | ST2 Antibody 1 light chain nucleic acid |
| 241 | ST2 Antibody 1 light chain amino acid |
| 242 | ST2 Antibody 2 light chain nucleic acid |
| 243 | ST2 Antibody 2 light chain amino acid |
| 244 | ST2 Antibody 3 light chain nucleic acid |
| 245 | ST2 Antibody 3 light chain amino acid |
| 246 | ST2 Antibody 4 light chain nucleic acid |
| 247 | ST2 Antibody 4 light chain amino acid |
| 248 | ST2 Antibody 5 light chain nucleic acid |
| 249 | ST2 Antibody 5 light chain amino acid |
| 250 | ST2 Antibody 6 light chain nucleic acid |
| 251 | ST2 Antibody 6 light chain amino acid |
| 252 | ST2 Antibody 7 light chain nucleic acid |
| 253 | ST2 Antibody 7 light chain amino acid |
| 254 | ST2 Antibody 8 light chain nucleic acid |
| 255 | ST2 Antibody 8 light chain amino acid |
| 256 | ST2 Antibody 9 light chain nucleic acid |
| 257 | ST2 Antibody 9 light chain amino acid |
| 258 | ST2 Antibody 10 light chain nucleic acid |
| 259 | ST2 Antibody 10 light chain amino acid |
| 260 | ST2 Antibody 11 light chain nucleic acid |
| 261 | ST2 Antibody 11 light chain amino acid |
| 262 | ST2 Antibody 12 light chain nucleic acid |
| 263 | ST2 Antibody 12 light chain amino acid |
| 264 | ST2 Antibody 13 light chain nucleic acid |
| 265 | ST2 Antibody 13 light chain amino acid |
| 266 | ST2 Antibody 14 light chain nucleic acid |
| 267 | ST2 Antibody 14 light chain amino acid |
| 268 | ST2 Antibody 15 light chain nucleic acid |
| 269 | ST2 Antibody 15 light chain amino acid |
| 270 | ST2 Antibody 16 light chain nucleic acid |
| 271 | ST2 Antibody 16 light chain amino acid |
| 272 | ST2 Antibody 17 light chain nucleic acid |
| 273 | ST2 Antibody 17 light chain amino acid |
| 274 | ST2 Antibody 18 light chain nucleic acid |
| 275 | ST2 Antibody 18 light chain amino acid |
| 276 | ST2 Antibody 19 light chain nucleic acid |
| 277 | ST2 Antibody 19 light chain amino acid |
| 278 | ST2 Antibody 20 light chain nucleic acid |
| 279 | ST2 Antibody 20 light chain amino acid |
| 280 | ST2 Antibody 21 light chain nucleic acid |
| 281 | ST2 Antibody 21 light chain amino acid |
| 282 | ST2 Antibody 22 light chain nucleic acid |
| 283 | ST2 Antibody 22 light chain amino acid |
| 284 | ST2 Antibody 23 light chain nucleic acid |
| 285 | ST2 Antibody 23 light chain amino acid |
| 286 | ST2 Antibody 24 light chain nucleic acid |
| 287 | ST2 Antibody 24 light chain amino acid |
| 288 | ST2 Antibody 25 light chain nucleic acid |
| 289 | ST2 Antibody 25 light chain amino acid |
| 290 | ST2 Antibody 26 light chain nucleic acid |
| 291 | ST2 Antibody 26 light chain amino acid |
| 292 | ST2 Antibody 27 light chain nucleic acid |
| 293 | ST2 Antibody 27 light chain amino acid |
| 294 | ST2 Antibody 28 light chain nucleic acid |
| 295 | ST2 Antibody 28 light chain amino acid |
| 296 | ST2 Antibody 29 light chain nucleic acid |
| 297 | ST2 Antibody 29 light chain amino acid |
| 298 | ST2 Antibody 30 light chain nucleic acid |
| 299 | ST2 Antibody 30 light chain amino acid |
| 300 | ST2 Antibody 31 light chain nucleic acid |
| 301 | ST2 Antibody 31 light chain amino acid |
| 302 | ST2 Antibody 32 light chain nucleic acid |
| 303 | ST2 Antibody 32 light chain amino acid |
| 304 | ST2 Antibody 33 light chain nucleic acid |
| 305 | ST2 Antibody 33 light chain amino acid |
| 306 | ST2 Antibody34 light chain nucleic acid |
| 307 | ST2 Antibody 34 light chain amino acid |
| 308 | ST2 Antibody 35 light chain nucleic acid |
| 309 | ST2 Antibody 35 light chain amino acid |
| 310 | ST2 Antibody 36 light chain nucleic acid |
| 311 | ST2 Antibody 36 light chain amino acid |
| 312 | ST2 Antibody 37 light chain nucleic acid |
| 313 | ST2 Antibody 37 light chain amino acid |
| 314 | ST2 Antibody 38 light chain nucleic acid |
| 315 | ST2 Antibody 38 light chain amino acid |
| 316 | ST2 Antibody 39 light chain nucleic acid |
| 317 | ST2 Antibody 39 light chain amino acid |
| 318 | ST2 Antibody 40 light chain nucleic acid |
| 319 | ST2 Antibody 40 light chain amino acid |
| 320 | ST2 Antibody 41 light chain nucleic acid |
| 321 | ST2 Antibody 41 light chain amino acid |
| 322 | ST2 Antibody 42 light chain nucleic acid |
| 323 | ST2 Antibody 42 light chain amino acid |
| 324 | ST2 Antibody 43 light chain nucleic acid |
| 325 | ST2 Antibody 43 light chain amino acid |
| 326 | ST2 Antibody 44 light chain nucleic acid |
| 327 | ST2 Antibody 44 light chain amino acid |
| 328 | ST2 Antibody 45 light chain nucleic acid |
| 329 | ST2 Antibody 45 light chain amino acid |
| 330 | ST2 Antibody 46 light chain nucleic acid |
| 331 | ST2 Antibody 46 light chain amino acid |
| 332 | ST2 Antibody 47 light chain nucleic acid |
| 333 | ST2 Antibody 47 light chain amino acid |
| 334 | ST2 Antibody 48 light chain nucleic acid |
| 335 | ST2 Antibody 48 light chain amino acid |
| 336 | ST2 Antibody 49 light chain nucleic acid |
| 337 | ST2 Antibody 49 light chain amino acid |
| 338 | ST2 Antibody 50 light chain nucleic acid |
| 339 | ST2 Antibody 50 light chain amino acid |
| 340 | ST2 Antibody 51 light chain nucleic acid |
| 341 | ST2 Antibody 51 light chain amino acid |
| 342 | ST2 Antibody 52 light chain nucleic acid |
| 343 | ST2 Antibody 52 light chain amino acid |
| 344 | ST2 Antibody 53 light chain nucleic acid |
| 345 | ST2 Antibody 53 light chain amino acid |
| 346 | ST2 Antibody 54 light chain nucleic acid |
| 347 | ST2 Antibody 54 light chain amino acid |
| 348 | ST2 Antibody 55 light chain nucleic acid |
| 349 | ST2 Antibody 55 light chain amino acid |
| 350 | ST2 Antibody 56 light chain nucleic acid |
| 351 | ST2 Antibody 56 light chain amino acid |
| 352 | ST2 Antibody 57 light chain nucleic acid |
| 353 | ST2 Antibody 57 light chain amino acid |
| 354 | ST2 Antibody 58 light chain nucleic acid |
| 355 | ST2 Antibody 58 light chain amino acid |
| 356 | ST2 Antibody 59 light chain nucleic acid |
| 357 | ST2 Antibody 59 light chain amino acid |
| 358 | ST2 Antibody 60 light chain nucleic acid |
| 359 | ST2 Antibody 60 light chain amino acid |
| 360 | ST2 Antibody 61 light chain nucleic acid |
| 361 | ST2 Antibody 61 light chain amino acid |
| 362 | ST2 Antibody 62 light chain nucleic acid |
| 363 | ST2 Antibody 62 light chain amino acid |
| 364 | ST2 Antibody 63 light chain nucleic acid |
| 365 | ST2 Antibody 63 light chain amino acid |
| 366 | ST2 Antibody 64 light chain nucleic acid |
| 367 | ST2 Antibody 64 light chain amino acid |
| 368 | ST2 Antibody 65 light chain nucleic acid |
| 369 | ST2 Antibody 65 light chain amino acid |
| 370 | ST2 Antibody 66 light chain nucleic acid |
| 371 | ST2 Antibody 66 light chain amino acid |
| 372 | ST2 Antibody 67 light chain nucleic acid |
| 373 | ST2 Antibody 67 light chain amino acid |
| 374 | ST2 Antibody 68 light chain nucleic acid |
| 375 | ST2 Antibody 68 light chain amino acid |
| 376 | ST2 Antibody 69 light chain nucleic acid |
| 377 | ST2 Antibody 69 light chain amino acid |
| 378 | ST2 Antibody 70 light chain nucleic acid |
| 379 | ST2 Antibody 70 light chain amino acid |
| 380 | ST2 Antibody 71 light chain nucleic acid |
| 381 | ST2 Antibody 71 light chain amino acid |
| 382 | ST2 Antibody 72 light chain nucleic acid |
| 383 | ST2 Antibody 72 light chain amino acid |
| 384 | ST2 Antibody 73 light chain nucleic acid |
| 385 | ST2 Antibody 73 light chain amino acid |
| 386 | ST2 Antibody 74 light chain nucleic acid |
| 387 | ST2 Antibody 74 light chain amino acid |
| 388 | ST2 Antibody 75 light chain nucleic acid |
| 389 | ST2 Antibody 75 light chain amino acid |
| 390 | ST2 Antibody 76 light chain nucleic acid |
| 391 | ST2 Antibody 76 light chain amino acid |
| 392 | ST2 Antibody 77 light chain nucleic acid |
| 393 | ST2 Antibody 77 light chain amino acid |
| 394 | ST2 Antibody 78 light chain nucleic acid |
| 395 | ST2 Antibody 78 light chain amino acid |
| 396 | ST2 Antibody 79 light chain nucleic acid |
| 397 | ST2 Antibody 79 light chain amino acid |
| 398 | ST2 Antibody 80 light chain nucleic acid |
| 399 | ST2 Antibody 80 light chain amino acid |
| 400 | ST2 Antibody 81 light chain nucleic acid |
| 401 | ST2 Antibody 81 light chain amino acid |
| 402 | ST2 Antibody 82 light chain nucleic acid |
| 403 | ST2 Antibody 82 light chain amino acid |
| 404 | ST2 Antibody 83 light chain nucleic acid |
| 405 | ST2 Antibody 83 light chain amino acid |
| 406 | ST2 Antibody 84 light chain nucleic acid |
| 407 | ST2 Antibody 84 light chain amino acid |
| 408 | ST2 Antibody 85 light chain nucleic acid |
| 409 | ST2 Antibody 85 light chain amino acid |
| 410 | ST2 Antibody 86 light chain nucleic acid |
| 411 | ST2 Antibody 86 light chain amino acid |
| 412 | ST2 Antibody 87 light chain nucleic acid |
| 413 | ST2 Antibody 87 light chain amino acid |
| 414 | ST2 Antibody 88 light chain nucleic acid |
| 415 | ST2 Antibody 88 light chain amino acid |
| 416 | ST2 Antibody 89 light chain nucleic acid |
| 417 | ST2 Antibody 89 light chain amino acid |
| 418 | ST2 Antibody 90 light chain nucleic acid |
| 419 | ST2 Antibody 90 light chain amino acid |
| 420 | ST2 Antibody 91 light chain nucleic acid |
| 421 | ST2 Antibody 91 light chain amino acid |
| 422 | ST2 Antibody 92 light chain nucleic acid |
| 423 | ST2 Antibody 92 light chain amino acid |
| 424 | ST2 Antibody 93 light chain nucleic acid |
| 425 | ST2 Antibody 93 light chain amino acid |
| 426 | ST2 Antibody 94 light chain nucleic acid |
| 427 | ST2 Antibody 94 light chain amino acid |
| 428 | ST2 Antibody 95 light chain nucleic acid |
| 429 | ST2 Antibody 95 light chain amino acid |
| 430 | ST2 Antibody 96 light chain nucleic acid |
| 431 | ST2 Antibody 96 light chain amino acid |
| 432 | ST2 Antibody 97 light chain nucleic acid |
| 433 | ST2 Antibody 97 light chain amino acid |
| 434 | ST2 Antibody 98 light chain nucleic acid |
| 435 | ST2 Antibody 98 light chain amino acid |
| 436 | ST2 Antibody 99 light chain nucleic acid |
| 437 | ST2 Antibody 99 light chain amino acid |
| 438 | ST2 Antibody 100 light chain nucleic acid |
| 439 | ST2 Antibody 100 light chain amino acid |
| 440 | ST2 Antibody 101 light chain nucleic acid |
| 441 | ST2 Antibody 101 light chain amino acid |
| 442 | ST2 Antibody 102 light chain nucleic acid |
| 443 | ST2 Antibody 102 light chain amino acid |
| 444 | ST2 Antibody 103 light chain nucleic acid |
| 445 | ST2 Antibody 103 light chain amino acid |
| 446 | ST2 Antibody 104 light chain nucleic acid |
| 447 | ST2 Antibody 104 light chain amino acid |
| 448 | ST2 Antibody 105 light chain nucleic acid |
| 449 | ST2 Antibody 105 light chain amino acid |
| 450 | ST2 Antibody 106 light chain nucleic acid |
| 451 | ST2 Antibody 106 light chain amino acid |
| 452 | ST2 Antibody 107 light chain nucleic acid |
| 453 | ST2 Antibody 107 light chain amino acid |
| 454 | ST2 Antibody 108 light chain nucleic acid |
| 455 | ST2 Antibody 108 light chain amino acid |
| 456 | ST2 Antibody 109 light chain nucleic acid |
| 457 | ST2 Antibody 109 light chain amino acid |
| 458-1111 | CDR amino acid sequences of Antibodies 1-109, see Table 2D |

### EXAMPLES

### Example 1. Construction of ST2 and IL2R Targeting Bispecific Molecules

[0189] Bispecific molecules targeting ST2 (IL-33 receptor), and IL-2 high affinity receptor were constructed. All constructed molecules are listed in Table 1 below. Their schematic diagrams are shown in FIG. 3.

[0190] Bispecific molecules in Table 1 and FIG. 3 are comprised of the human IL-2 variant (N88R, C125S) and an antigen-binding fragment (Fab) of an anti-ST2 antibody. As a proof of concept, two anti-ST2 mAbs, Ab2 and Ab4, were selected from a published patent application (US2017/0002079 A1). Each bispecific molecule is either monovalent or bivalent with respect to the anti-ST2 antigen binding fragment and is covalently connected to the IL-2 receptor agonist at the N or C terminus through the peptide linker, (G₄S)₃.

[0191] Production of heterodimeric Fc proteins can be challenging due to potential homodimer contamination. All heterodimeric molecules in this example have mutations on the Fc domain to reduce unwanted homodimer pairing. The mutations include T350V, L351Y, F405A & Y407V on one chain; and T350V, T366L, K392L & T394W on the other chain. Such mutations have been reported to improve proper pairing and stability (Von Kreudenstein et al., 2013, mAbs 5: 646-654; WO 2014082179 A1).

TABLE 1
Dimeric proteins comprising Fc regions, an antigen-binding fragment
of an anti-ST2 antibody, and an IL-2 variant (N88R, C125S).
Diagrams of the proteins are provided in FIG. 3A-3E.

| | Dimeric | Heavy Chain 1 | Heavy Chain 2 | |
|---|---|---|---|---|
| FIG. | Protein | (Fusion Protein) | (Fusion Protein) | Light Chains |
| 3A | Ab2-IL2vCB | Ab2Heavy-IL2vC | (same as Heavy | Ab2Kappa |
| | | (SEQ ID NO: 12) | Chain 1, homodimer) | (SEQ ID NO: 19) |
| | Ab4-IL2vCB | Ab4Heavy-IL2vC | (same as Heavy | Ab4Kappa |
| | | (SEQ ID NO: 13) | Chain 1, homodimer) | (SEQ ID NO: 20) |
| 3B | Ab2-IL2vCM | Ab2Heavy(V) | Ab2HeavyIL2vC(W) | Ab2Kappa |
| | | (SEQ ID NO: 16) | (SEQ ID NO: 14) | (SEQ ID NO: 19) |
| | Ab4-IL2vCM | Ab4Heavy(V) | Ab4HeavyIL2vC(W) | Ab4Kappa |
| | | (SEQ ID NO: 17) | (SEQ ID NO: 15) | (SEQ ID NO: 20) |
| 3C | Ab2M-IL2vCM | Ab2Heavy(V) | IL2vCFc(W) | Ab2Kappa |
| | | (SEQ ID NO: 16) | (SEQ ID NO: 11) | (SEQ ID NO: 19) |
| | AB4M-IL2vCM | Ab4Heavy(V) | IL2vCFc(W) | Ab4Kappa |
| | | (SEQ ID NO: 17) | (SEQ ID NO: 11) | (SEQ ID NO: 20) |
| 3D | Ab2M-IL2vNM | Ab2Heavy(V) | IL2vNFc(W) | Ab2Kappa |
| | | (SEQ ID NO: 16) | (SEQ ID NO: 10) | (SEQ ID NO: 19) |
| | Ab4M-IL2vNM | Ab4Heavy(V) | IL2vNFc(W) | Ab4Kappa |
| | | (SEQ ID NO: 17) | (SEQ ID NO: 10) | (SEQ ID NO: 20) |
| 3E | Ab2M-IL2vCB | IL2vCFc(V) | Ab2HeavyIL2vC(W) | Ab2Kappa |
| | | (SEQ ID NO: 18) | (SEQ ID NO: 14) | (SEQ ID NO: 19) |
| | Ab4M-IL2vCB | IL2vCFc(V) | Ab4HeavyIL2C(W) | Ab4Kappa |
| | | (SEQ ID NO: 18) | (SEQ ID NO: 15) | (SEQ ID NO: 20) |

[0192] All molecules were produced in transiently-transfected HEK293 cells and purified by Protein A affinity chromatography followed by size exclusion chromatography.

### Example 2. Binding Characterization of Anti-ST2/IL2v Bispecific Molecules

[0193] Binding of anti-ST2/IL2v bispecific proteins to human ST2 and IL2Ra was evaluated by surface plasmon resonance (SPR) using the Biacore T200 instrument (GE). Anti-His Tag antibody (GenScript) was immobilized on CM4 chips (GE) by NHS-EDS coupling, and binding reactions were carried out in HBS-EP+ buffer (GE) at 25° C. His-tagged ST2 ECD protein was captured by anti-His Tag antibody coated chips.

[0194] For ST2 binding, histidine tagged human ST2 ECD protein was captured on the chip as ligand. Ab2-IL2v bispecific molecules, which are comprised of the Fab of anti-ST2 mAb (Ab2) and IL-2v, were injected as analytes at a flow rate of 50 μl/min for 400 sec and allowed to dissociated for 600 sec. Ab2-IL2v bispecific molecules were prepared at various concentrations (0.012 nM-1 nM by 3-fold dilution). Ab4-IL2v bispecific molecules, which are comprised of the Fab of anti-ST2 mAb, Ab4 and IL-2v, were injected as analyte at a flow rate of 50 μl/min for 200 sec and allowed to dissociated for 400 sec. Ab4-IL2v bispecific molecules were prepared at various concentrations (0.062 nM-5 nM by 3-fold dilution). The chip surface was regenerated with 10 mM glycine pH 1.7. Association and dissociation signals of monovalent anti-ST2 bispecific molecules were fitted to 1:1 binding, using Biacore Evaluation Software Version 2.0 to yield kinetic constants (kₐ & k_{d}) and to calculate the dissociation constants (K_{d}).

[0195] Sensorgrams are shown in FIGS. 4A and 4B; and kinetic constants and dissociation constants are summarized in Table 3 below. All bispecific molecules exhibited clear binding to ST2 protein. K_{d} values of monovalent Ab2-IL2v bispecific molecules ranged from 94 pM to 137 pM in comparison to the reported value, 34 pM in patent US2017/0002079 A1. K_{d} values of monovalent Ab4/IL2v bispecific molecules ranged from 289 pM to 378 pM in comparison to the reported value, 301 pM in patent US2017/0002079 A1.

TABLE 3
Analysis of binding to human ST2 ECD protein

| Analyte | Ligand | kₐ (1/Ms) | k_{d} (1/s) | K_{d} (M) |
|---|---|---|---|---|
| Ab2M-IL2vCM | Human ST2 | 3.28E6 | 3.47E−4 | 1.06E−10 |
| Ab2M-IL2vNM | Human ST2 | 3.34E6 | 3.17E−4 | 9.43E−11 |
| Ab2M-IL2vCB | Human ST2 | 2.50E6 | 3.44E−4 | 1.37E−10 |
| Ab4M-IL2vCM | Human ST2 | 5.57E6 | 0.0020 | 3.68E−10 |
| Ab4M-IL2vNM | Human ST2 | 5.44E6 | 0.0021 | 3.78E−10 |
| Ab4M-IL2vCB | Human ST2 | 6.16E6 | 0.0018 | 2.89E−10 |

[0196] To test if the bispecific molecules bind to both ST2 and IL2Ra simultaneously, the bispecific molecules were captured by histidine tagged human ST2, which was immobilized on the chip. Subsequently, IL2R alpha was injected as analyte at a flow rate of 50 μl/min for 50 sec and allowed to dissociated for 60 sec. IL2Ra was prepared at various concentrations (2.5 nM-200 nM by 3 fold dilution). The chip surface was regenerated with 10 mM glycine pH 1.7. Association and dissociation signals were fitted to 1:1 binding, using Biacore Evaluation Software Version 2.0 to yield kinetic constants (kₐ & k_{d}) and to calculate the dissociation constants (K_{d}).

[0197] Sensorgrams are shown in FIGS. 5A and 5B; and kinetic constants and dissociation constants are summarized in Table 4 below. They all bound to human IL2R alpha at K_{d} values (25-43 nM) comparable to the previously reported values. This shows the IL2v moiety retains IL2Ra binding; and the bispecific molecules are able to bind to both ST2 and IL2Ra simultaneously because they showed binding to IL2Ra while being bound to ST2 protein.

TABLE 4
Simultaneous binding of proteins
to both ST2 ECD and IL2Ra ECD

| | ST2-bound | | | |
|---|---|---|---|---|
| Analyte | Ligand | kₐ (1/Ms) | k_{d} (1/s) | K_{d} (M) |
| Human IL2R alpha | Ab2M-IL2vCM | 6.73E6 | 0.1819 | 2.70E−8 |
| Human IL2R alpha | Ab2M-IL2vNM | 6.26E6 | 0.1550 | 2.48E−8 |
| Human IL2R alpha | Ab2M-IL2vCB | 5.78E6 | 0.1885 | 3.26E−8 |
| Human IL2R alpha | Ab4M-IL2vCM | 9.84E6 | 0.2513 | 2.55E−8 |
| Human IL2R alpha | Ab4M-IL2vNM | 7.14E6 | 0.1788 | 2.51E−8 |
| Human IL2R alpha | Ab4M-IL2vCB | 5.27E6 | 0.2002 | 3.80E−8 |
| Human IL2R alpha | Ab2-IL2vCB | 4.59E6 | 0.1633 | 3.56E−8 |
| Human IL2R alpha | Ab2-IL2vCM | 5.13E6 | 0.1677 | 3.27E−8 |
| Human IL2R alpha | Ab4-IL2vCB | 4.55E6 | 0.1944 | 4.27E−8 |
| Human IL2R alpha | Ab4-IL2vCM | 6.26E6 | 0.2568 | 4.10E−8 |

### Example 3. Isolation of Novel Human ST2 Antibodies

[0198] Novel human ST2 antibodies were generated by using a human scFv phage display library. Selection was performed with the recombinant human ST2 extracellular domain (ECD). Phage particles that were enriched after the 3 rounds of selection were subject to ELISA screening. The scFv fragments from the phage particles that showed binding to the ST2 ECD by ELISA were reformatted to IgG1.

### Example 4. Binding Affinity of Human ST2 Antibodies to Human ST2 and Mouse ST2

[0199] Binding of the reformatted human ST2 antibodies to the human and mouse ST2 proteins was evaluated by surface plasmon resonance (SPR), using a high throughput antibody screening and characterization platform from Carterra (Salt Lake City, Utah). The antibodies were immobilized as ligand molecules, and the ST2 proteins were flowed through as analyte molecules to obtain 1 tol binding kinectic rates and affinity, as shown in Table 5 below.

TABLE 5
Binding Affinity of human ST2 antibodies to human ST2 and mouse ST2.

| ST2 Antibody | Human ST2 | | | | | |
|---|---|---|---|---|---|---|
| # | ka (M−1 s−1) | kd (s−1) | KD (M) | | Rmax | Res sd |
| 1 | 1.200E+005 | 7.200E−002 | 617 | nM | 2.390E+002 | 8.000E+000 |
| 2 | 5.00E+005 | 1.10E−001 | 229 | nM | 279 | 8.3 |
| 3 | 2.90E+005 | 4.20E−002 | 146 | nM | 289 | 7.4 |
| 4 | 2.10E+005 | 2.50E−003 | 12 | nM | 274 | 12 |
| 5 | 2.50E+005 | 4.80E−002 | 190 | nM | 263 | 5 |
| 6 | 3.400E+005 | 5.700E−002 | 166 | nM | 2.310E+002 | 4.800E+000 |
| 7 | 2.90E+005 | 4.40E−003 | 15 | nM | 276 | 6.8 |
| 8 | 1.10E+005 | 1.70E−002 | 153 | nM | 288 | 4.4 |
| 9 | 1.20E+005 | 3.60E−002 | 293 | nM | 281 | 4.7 |
| 10 | 6.00E+005 | 7.90E−002 | 131 | nM | 273 | 9 |
| 11 | 7.80E+005 | 1.90E−002 | 25 | nM | 317 | 7.4 |
| 12 | 1.10E+005 | 2.40E−002 | 217 | nM | 311 | 5.3 |
| 13 | 2.00E+005 | 4.00E−002 | 201 | nM | 294 | 5.7 |
| 14 | 4.00E+005 | 1.70E−002 | 42 | nM | 252 | 6.3 |
| 15 | 1.90E+005 | 1.40E−001 | 769 | nM | 244 | 6.3 |
| 16 | 5.80E+005 | 5.60E−002 | 96 | nM | 290 | 6.6 |
| 17 | 7.60E+004 | 3.30E−002 | 433 | nM | 279 | 4.2 |
| 18 | 9.50E+004 | 1.10E−001 | 1.1 | uM | 217 | 3.9 |
| 19 | 5.50E+005 | 6.20E−002 | 113 | nM | 284 | 6.1 |
| 20 | 8.10E+005 | 6.50E−002 | 81 | nM | 277 | 7.4 |
| 21 | 2.10E+004 | 1.70E−002 | 805 | nM | 146 | 2.6 |
| 22 | 5.30E+005 | 4.80E−002 | 90 | nM | 240 | 4.4 |
| 23 | 1.50E+005 | 1.00E−001 | 688 | nM | 223 | 3.6 |
| 24 | 4.50E+004 | 5.50E−002 | 1.2 | uM | 166 | 4.5 |
| 25 | 1.50E+005 | 3.00E−002 | 193 | nM | 292 | 5.6 |
| 26 | 5.30E+005 | 1.40E−001 | 264 | nM | 273 | 9.5 |
| 27 | 4.50E+005 | 4.80E−002 | 106 | nM | 139 | 4.4 |
| 28 | 1.60E+005 | 6.60E−002 | 426 | nM | 258 | 6.4 |
| 29 | 1.40E+004 | 6.50E−003 | 480 | nM | 95 | 3.6 |
| 30 | 1.90E+005 | 2.90E−002 | 155 | nM | 264 | 4.3 |
| 31 | 4.30E+005 | 1.20E−001 | 274 | nM | 262 | 7.4 |
| 32 | 2.40E+005 | 6.10E−002 | 252 | nM | 262 | 4.6 |
| 33 | 2.40E+005 | 1.30E−001 | 529 | nM | 263 | 7.4 |
| 34 | 1.00E+004 | 1.10E−003 | 109 | nM | 165 | 8 |
| 35 | 1.60E+005 | 1.60E−002 | 104 | nM | 300 | 5.3 |
| 36 | 5.10E+005 | 1.40E−001 | 264 | nM | 297 | 4.2 |
| 37 | 6.20E+005 | 8.50E−002 | 138 | nM | 296 | 12 |
| 38 | 3.10E+005 | 5.30E−003 | 17 | nM | 248 | 5.4 |
| 39 | 3.90E+005 | 2.20E−002 | 57 | nM | 313 | 7 |
| 40 | 1.80E+005 | 1.20E−001 | 691 | nM | 245 | 6.5 |
| 41 | 2.40E+004 | 2.40E−003 | 99 | nM | 262 | 4.1 |
| 42 | 3.20E+005 | 8.80E−002 | 278 | nM | 242 | 8.1 |
| 43 | 5.10E+004 | 7.40E−003 | 146 | nM | 318 | 8.1 |
| 44 | 2.40E+005 | 2.40E−002 | 100 | nM | 290 | 6 |
| 45 | 9.20E+005 | 2.00E−002 | 22 | nM | 318 | 8.8 |
| 46 | 1.20E+005 | 4.20E−002 | 339 | nM | 263 | 5.5 |
| 47 | 3.00E+005 | 1.20E−001 | 413 | nM | 264 | 6.2 |
| 48 | 1.70E+005 | 2.40E−002 | 146 | nM | 317 | 4.1 |
| 49 | 3.20E+005 | 8.50E−002 | 269 | nM | 272 | 6.8 |
| 50 | 3.50E+005 | 7.50E−002 | 213 | nM | 278 | 7.2 |
| 51 | 2.80E+005 | 4.30E−002 | 154 | nM | 381 | 7.5 |
| 52 | 1.60E+005 | 1.50E−001 | 932 | nM | 190 | 4.2 |
| 53 | 1.60E+005 | 1.20E−001 | 740 | nM | 230 | 6.8 |
| 54 | 3.60E+005 | 2.90E−002 | 81 | nM | 301 | 8.7 |
| 55 | 3.00E+005 | 1.00E−001 | 349 | nM | 254 | 7.3 |
| 56 | 1.50E+005 | 1.40E−001 | 970 | nM | 204 | 5.2 |
| 57 | 5.10E+005 | 7.20E−002 | 140 | nM | 272 | 4.9 |
| 58 | 2.20E+005 | 1.40E−001 | 628 | nM | 259 | 6.3 |
| 59 | 1.90E+005 | 1.90E−001 | 1.0 | uM | 232 | 3.7 |
| 60 | 1.10E+005 | 1.20E−001 | 1.1 | uM | 163 | 4.7 |
| 61 | 2.60E+005 | 1.40E−001 | 563 | nM | 224 | 3.9 |
| 62 | 9.60E+005 | 6.80E−002 | 71 | nM | 236 | 6.7 |
| 63 | 4.50E+005 | 4.30E−002 | 96 | nM | 240 | 6.6 |
| 64 | 3.30E+005 | 1.20E−001 | 366 | nM | 263 | 6.2 |
| 65 | 7.30E+005 | 5.50E−002 | 76 | nM | 268 | 8.3 |
| 66 | 1.60E+004 | 2.80E−003 | 176 | nM | 32 | 2.8 |
| 67 | 1.40E+005 | 1.00E−001 | 738 | nM | 234 | 7 |
| 68 | 1.90E+005 | 1.30E−001 | 704 | nM | 205 | 3.4 |
| 69 | 4.10E+005 | 2.90E−002 | 71 | nM | 278 | 9.7 |
| 70 | 3.70E+005 | 9.90E−002 | 268 | nM | 281 | 10 |
| 71 | 1.40E+005 | 1.20E−001 | 912 | nM | 231 | 5.4 |
| 72 | 2.40E+005 | 8.20E−002 | 335 | nM | 233 | 5.3 |
| 73 | 1.40E+005 | 8.50E−002 | 603 | nM | 262 | 3.6 |
| 74 | 2.00E+005 | 1.20E−002 | 60 | nM | 297 | 7.4 |
| 75 | 1.20E+005 | 4.10E−002 | 360 | nM | 234 | 5.3 |
| 76 | 8.20E+005 | 1.10E−001 | 133 | nM | 301 | 7.3 |
| 77 | 2.60E+005 | 9.90E−002 | 377 | nM | 254 | 7.2 |
| 78 | 5.30E+005 | 8.20E−002 | 154 | nM | 195 | 4.7 |
| 79 | N/A | N/A | N/A | | N/A | N/A |
| 80 | 6.70E+004 | 5.60E−002 | 842 | nM | 138 | 5.6 |
| 81 | 2.00E+005 | 2.60E−002 | 126 | nM | 283 | 6.2 |
| 82 | 1.50E+004 | 3.00E−003 | 204 | nM | 131 | 11 |
| 83 | 2.60E+005 | 1.80E−002 | 70 | nM | 248 | 4 |
| 84 | 1.50E+004 | 1.90E−003 | 125 | nM | 21 | 1.9 |
| 85 | 1.20E+005 | 6.80E−002 | 554 | nM | 173 | 4.4 |
| 86 | 7.20E+005 | 2.90E−002 | 41 | nM | 322 | 8.8 |
| 87 | 2.70E+004 | 1.80E−002 | 642 | nM | 126 | 6.4 |
| 88 | 2.40E+005 | 1.30E−001 | 543 | nM | 183 | 3.2 |
| 89 | 2.40E+005 | 2.40E−002 | 102 | nM | 233 | 5.3 |
| 90 | 1.70E+005 | 1.70E−001 | 970 | nM | 223 | 4.2 |
| 91 | 1.60E+005 | 4.10E−002 | 256 | nM | 263 | 4.7 |
| 92 | 2.00E+005 | 1.30E−001 | 662 | nM | 229 | 6.1 |
| 93 | 1.50E+005 | 1.10E−001 | 728 | nM | 218 | 6.1 |
| 94 | 1.30E+005 | 6.20E−002 | 483 | nM | 229 | 9.3 |
| 95 | 1.90E+004 | 8.60E−003 | 446 | nM | 53 | 3.5 |
| 96 | 2.90E+005 | 9.70E−002 | 337 | nM | 252 | 7.4 |
| 97 | 2.00E+005 | 6.30E−003 | 31 | nM | 297 | 12 |
| 98 | 2.70E+005 | 2.50E−002 | 95 | nM | 227 | 5.8 |
| 99 | 4.60E+005 | 8.90E−002 | 192 | nM | 231 | 6.9 |
| 100 | 2.20E+005 | 7.40E−002 | 342 | nM | 213 | 4 |
| 101 | 1.90E+005 | 1.10E−001 | 590 | nM | 227 | 7 |
| 102 | 2.40E+005 | 6.50E−002 | 270 | nM | 286 | 5.5 |
| 103 | 4.50E+004 | 6.30E−003 | 140 | nM | 96 | 7.5 |
| 104 | 5.10E+005 | 6.10E−002 | 121 | nM | 276 | 5.7 |
| 105 | 3.70E+005 | 9.50E−002 | 256 | nM | 277 | 6.5 |
| 106 | 2.40E+005 | 1.50E−001 | 616 | nM | 247 | 7.2 |
| 107 | 1.30E+005 | 6.20E−002 | 465 | nM | 212 | 9.1 |
| 108 | 2.00E+005 | 5.60E−003 | 28 | nM | 313 | 9.3 |
| 109 | 6.00E+005 | 6.10E−003 | 10 | nM | 308 | 7.3 |
| ST2 Antibody | Mouse ST2 | | | | | |
| # | ka (M−1 s−1) | kd (s−1) | KD (M) | | Rmax | Res sd |
| 1 | N/A | N/A | N/A | | N/A | N/A |
| 2 | N/A | N/A | N/A | | N/A | N/A |
| 3 | N/A | N/A | N/A | | N/A | N/A |
| 4 | N/A | N/A | N/A | | N/A | N/A |
| 5 | N/A | N/A | N/A | | N/A | N/A |
| 6 | 3.500E+004 | 1.800E−001 | 5.0 | uM | 2.430E+002 | 1.700E+000 |
| 7 | 6.90E+004 | 1.30E−001 | 1.9 | uM | 168 | 2.5 |
| 8 | N/A | N/A | N/A | | N/A | N/A |
| 9 | 9.10E+004 | 3.20E−002 | 351 | nM | 273 | 3.2 |
| 10 | N/A | N/A | N/A | | N/A | N/A |
| 11 | N/A | N/A | N/A | | N/A | N/A |
| 12 | 3.60E+004 | 5.30E−002 | 1.5 | uM | 244 | 2.5 |
| 13 | N/A | N/A | N/A | | N/A | N/A |
| 14 | N/A | N/A | N/A | | N/A | N/A |
| 15 | N/A | N/A | N/A | | N/A | N/A |
| 16 | 3.20E+005 | 1.00E−001 | 315 | nM | 260 | 5.5 |
| 17 | N/A | N/A | N/A | | N/A | N/A |
| 18 | N/A | N/A | N/A | | N/A | N/A |
| 19 | 3.70E+005 | 1.10E−001 | 311 | nM | 244 | 4.9 |
| 20 | 7.70E+004 | 1.70E−001 | 2.2 | uM | 165 | 2.3 |
| 21 | 8.50E+003 | 8.50E−003 | 999 | nM | 38 | 1.1 |
| 22 | 1.20E+005 | 1.40E−001 | 1.1 | uM | 165 | 2.8 |
| 23 | N/A | N/A | N/A | | N/A | N/A |
| 24 | N/A | N/A | N/A | | N/A | N/A |
| 25 | 2.00E+005 | 6.40E−002 | 322 | nM | 274 | 5 |
| 26 | N/A | N/A | N/A | | N/A | N/A |
| 27 | N/A | N/A | N/A | | N/A | N/A |
| 28 | N/A | N/A | N/A | | N/A | N/A |
| 29 | 5.90E+003 | 4.50E−003 | 751 | nM | 50 | 1.2 |
| 30 | 4.80E+004 | 1.30E−001 | 2.7 | uM | 188 | 1.1 |
| 31 | N/A | N/A | N/A | | N/A | N/A |
| 32 | N/A | N/A | N/A | | N/A | N/A |
| 33 | N/A | N/A | N/A | | N/A | N/A |
| 34 | 1.50E+004 | 1.90E−003 | 126 | nM | 125 | 8.4 |
| 35 | 1.70E+005 | 1.80E−002 | 107 | nM | 291 | 5.4 |
| 36 | N/A | N/A | N/A | | N/A | N/A |
| 37 | 4.20E+004 | 6.10E−002 | 1.4 | uM | 56 | 2.5 |
| 38 | 1.70E+005 | 9.00E−002 | 529 | nM | 207 | 2.7 |
| 39 | 4.20E+004 | 1.40E−001 | 3.4 | uM | 172 | 2.2 |
| 40 | N/A | N/A | N/A | | N/A | N/A |
| 41 | 1.40E+005 | 1.10E−001 | 845 | nM | 254 | 3.6 |
| 42 | N/A | N/A | N/A | | N/A | N/A |
| 43 | N/A | N/A | N/A | | N/A | N/A |
| 44 | 1.10E+005 | 1.10E−001 | 999 | nM | 243 | 3.6 |
| 45 | 9.50E+004 | 1.30E−001 | 1.4 | uM | 257 | 2.5 |
| 46 | 3.30E+004 | 1.60E−001 | 5.0 | uM | 228 | 1.1 |
| 47 | N/A | N/A | N/A | | N/A | N/A |
| 48 | N/A | N/A | N/A | | N/A | N/A |
| 49 | 2.70E+005 | 1.20E−001 | 436 | nM | 246 | 4.5 |
| 50 | N/A | N/A | N/A | | N/A | N/A |
| 51 | 8.30E+004 | 1.70E−001 | 2.1 | uM | 245 | 1.8 |
| 52 | 5.90E+004 | 1.60E−001 | 2.7 | uM | 200 | 1.9 |
| 53 | N/A | N/A | N/A | | N/A | N/A |
| 54 | 5.00E+004 | 1.30E−001 | 2.7 | uM | 89 | 1.5 |
| 55 | N/A | N/A | N/A | | N/A | N/A |
| 56 | N/A | N/A | N/A | | N/A | N/A |
| 57 | 5.10E+004 | 1.60E−001 | 3.1 | uM | 125 | 1.9 |
| 58 | N/A | N/A | N/A | | N/A | N/A |
| 59 | N/A | N/A | N/A | | N/A | N/A |
| 60 | N/A | N/A | N/A | | N/A | N/A |
| 61 | N/A | N/A | N/A | | N/A | N/A |
| 62 | N/A | N/A | N/A | | N/A | N/A |
| 63 | 6.20E+004 | 1.50E−001 | 2.4 | uM | 142 | 1.5 |
| 64 | N/A | N/A | N/A | | N/A | N/A |
| 65 | N/A | N/A | N/A | | N/A | N/A |
| 66 | N/A | N/A | N/A | | N/A | N/A |
| 67 | N/A | N/A | N/A | | N/A | N/A |
| 68 | N/A | N/A | N/A | | N/A | N/A |
| 69 | N/A | N/A | N/A | | N/A | N/A |
| 70 | 3.30E+004 | 1.30E−001 | 3.9 | uM | 117 | 1.6 |
| 71 | N/A | N/A | N/A | | N/A | N/A |
| 72 | N/A | N/A | N/A | | N/A | N/A |
| 73 | N/A | N/A | N/A | | N/A | N/A |
| 74 | 9.60E+003 | 1.20E−001 | 12 | uM | 257 | 1.2 |
| 75 | N/A | N/A | N/A | | N/A | N/A |
| 76 | 1.80E+005 | 1.40E−001 | 778 | nM | 214 | 3.3 |
| 77 | N/A | N/A | N/A | | N/A | N/A |
| 78 | 1.80E+005 | 1.30E−001 | 744 | nM | 178 | 2.6 |
| 79 | N/A | N/A | N/A | | N/A | N/A |
| 80 | N/A | N/A | N/A | | N/A | N/A |
| 81 | N/A | N/A | N/A | | N/A | N/A |
| 82 | N/A | N/A | N/A | | N/A | N/A |
| 83 | 1.40E+005 | 6.30E−002 | 438 | nM | 216 | 3.2 |
| 84 | N/A | N/A | N/A | | N/A | N/A |
| 85 | N/A | N/A | N/A | | N/A | N/A |
| 86 | 1.90E+005 | 9.80E−002 | 507 | nM | 262 | 5.4 |
| 87 | N/A | N/A | N/A | | N/A | N/A |
| 88 | 6.10E+004 | 9.30E−002 | 1.5 | uM | 105 | 3 |
| 89 | 1.00E+005 | 1.00E−001 | 989 | nM | 188 | 2.6 |
| 90 | N/A | N/A | N/A | | N/A | N/A |
| 91 | N/A | N/A | N/A | | N/A | N/A |
| 92 | N/A | N/A | N/A | | N/A | N/A |
| 93 | N/A | N/A | N/A | | N/A | N/A |
| 94 | 3.70E+004 | 8.60E−002 | 2.3 | uM | 167 | 2.4 |
| 95 | N/A | N/A | N/A | | N/A | N/A |
| 96 | N/A | N/A | N/A | | N/A | N/A |
| 97 | N/A | N/A | N/A | | N/A | N/A |
| 98 | 1.20E+005 | 1.20E−001 | 975 | nM | 181 | 2.6 |
| 99 | 2.30E+005 | 9.80E−002 | 419 | nM | 202 | 4.4 |
| 100 | N/A | N/A | N/A | | N/A | N/A |
| 101 | N/A | N/A | N/A | | N/A | N/A |
| 102 | N/A | N/A | N/A | | N/A | N/A |
| 103 | 2.70E+004 | 5.80E−003 | 211 | nM | 78 | 3.3 |
| 104 | 1.40E+005 | 9.60E−002 | 684 | nM | 222 | 3.4 |
| 105 | 4.10E+005 | 7.00E−002 | 172 | nM | 273 | 5.5 |
| 106 | N/A | N/A | N/A | | N/A | N/A |
| 107 | N/A | N/A | N/A | | N/A | N/A |
| 108 | N/A | N/A | N/A | | N/A | N/A |
| 109 | 1.10E+006 | 1.30E−003 | 1.1 | nM | 140 | 16 |

### Example 5. Evaluation of Bispecific Molecules in Activation of ST2+ Tregs in Mouse Spleen (Prophetic)

[0200] ST2+ Treg are found in several human tissues at high levels, but are found in blood at a very low frequency, <0.01%. Due to the difficulty of obtaining tissues from human donors, the effect of bispecific Fc fusion proteins containing an IL-2 variant and an ST2 antibody will be assessed on ST2+ Treg from mouse spleen, which was found to have higher levels of ST2+ Tregs (5-10% of Tregs), more than were found in blood (0.1-1.0% of Tregs). Spleens will be isolated from C57Bl/6J mice, and single cell suspensions stimulated with a range of concentrations of either a monovalent IL-2 variant Fc fusion, a monovalent ST2 antibody Fc fusion or a bispecific IL-2 variant/ST2 antibody Fc fusion. Treg activation by IL-2 will be measured by determining the level of intracellular phosphorylated STAT5 (pSTAT5) by flow cytometry. It is expected that the bispecific protein will enhance pSTAT5 induction in ST2+ Treg, above levels seen with either the IL-2 variant Fc fusion or ST2 antibody Fc fusion proteins alone, but not in ST2− Treg demonstrating that the bispecific molecule preferentially activates ST2+ Treg.

### Example 6. Activity of IL2/ST2 Antibody Bispecific Molecule in Normal Mice (Prophetic)

[0201] To determine their activity on Treg populations in normal mice, BALB/c mice will be injected intravenously with a single dose of 0.001, 0.01, or 0.1 mg/kg of either an IL-2 variant/Fc fusion proteins, an ST2 antibody/Fc fusion proteins, or a bispecific IL2-ST2 antibody fusion protein (e.g. FIG. 3). Spleens and livers will be harvested 2, 4, 6 or 8 days after treatment, and numbers and percentages (as a fraction of CD4 cells) of ST2+ Treg will be determined. In addition, the proliferative index of the ST2+ and ST2− Treg subsets will be determined by intracellular staining of cells with antibody to Ki67.

[0202] If a bispecific IL2-ST2 antibody Fc fusion has greater selectivity for ST2+ Tregs than the IL2 variant Fc fusion and ST2 antibody Fc fusion, greater expansion of ST2+ Tregs than ST2-Tregs will be observed upon treatment with the bispecific protein compared to the IL2 variant Fc fusion and the ST2 antibody Fc fusion. An increase in the proliferative index, as reflected by the percent Ki67+ cells, will also result from treatment with the bispecific proteins compared to the IL2 variant Fc fusion and the ST2 antibody Fc fusion. The effects of the proteins on Tregs can be correlated with the pharmacokinetics of the administered proteins. Blood samples taken after administration will be evaluated by a quantitative immunoassay to determine the pharmacokinetics of administered molecules.

### Example 7. Activity in Models of Muscle Inflammation (Prophetic)

[0203] The role of ST2+ Tregs has been established in animal models of muscle inflammation. One of those animal models is acute muscle injury (Burzyn et al., 2013, Cell 155(6): 1282-1295) in wild type mice, and a second model is the mdx mouse muscular dystrophy model, a model of chronic muscle inflammation caused by genetic deficiency in dystrophin (mdx mice; Villalta et al., 2014, Sci Transl Med 5(258): 258ra142).

[0204] Acute muscle injury will be initiated in mice by the injection of cardiotoxin into hind limb muscles of C57Bl/6J mice, as described by Burzyn et al. (cited above). Treatment with 0.1 mg/kg of IL-2-ST2 antibody bispecific molecules (e.g. FIGS. 3A and 3B) will be initiated on the day of injury, and again on day 7. Mice will be sacrificed on day 1, 4, 7 and 14, and the number of Tregs, Teff and other infiltrating immune cells in the muscle will be determined by flow cytometry. Amphiregulin (AREG) production by Treg is a crucial mediator of muscle repair (Burzyn et al., cited above), and the frequency of AREG+ Treg, and the proliferative index (Ki67+ Treg) will be determined by intracellular flow cytometry. Measures of muscle injury and repair, such as creatine kinase levels in the serum and muscle fiber morphology will also be assessed.

[0205] For the mouse mdx muscular dystrophy model, treatment of mdx mice will be initiated at 2 weeks of age. Mice will be treated weekly with 0.1 mg/kg of test proteins and sacrificed at 6 weeks of age. The number and frequency of proliferating Treg (Ki67+) and AREG+ Treg will be measured in muscles of treated mice compared to age-matched untreated controls.

[0206] Successful activation of ST2+ Tregs will result in a numerical increase in Treg, a higher proportion of Ki67+ Treg, or a higher proportion of AREG+ Treg in muscle. Additionally, the mice may exhibit a reduction in Teff cells, decreased serum creatine kinase, and improved muscle morphology.

### Example 8. Activity in Models of Inflammatory Bowel Disease (Prophetic)

[0207] A role for ST2+ Treg has been established in a mouse model of inflammatory bowel disease (Schiering et al., 2014, Nature 513(7519):564-568). The effect of test proteins on ST2+ Treg in colonic tissue will be tested in an acute model of inflammatory bowel disease. C57Bl/6J mice will be fed 3% dextran sodium sulfate (DSS) in the drinking water for 7 days. Mice will be treated IV, IP, or SC with 0.1 or 0.4 mg/kg of IL-2/ST2 antibody bispecific molecules (e.g. FIGS. 3A and 3B) on day 1 and day 4 of DSS treatment, with DSS treatment starting on day 1. After the 7 day DSS treatment, mice will be sacrificed, and spleens, colons and mesenteric lymph nodes (MLNs) harvested. Colon sections will analyzed by histology for disease severity and colitis scores. ST2+ Treg populations will be measured in spleens, colons and MLNs.

[0208] Successful treatment could result in reduced weight loss, improved disease scores or histology in treated mice compared to controls. Disease improvement might be accompanied by a specific increase in Ki67+ proliferating ST2+ Treg in the colons and MLNs of treated mice.

[0209] While preferred embodiments of the present invention have been shown and described herein, it will be obvious to those skilled in the art that such embodiments are provided by way of example only. Numerous variations, changes, and substitutions will now occur to those skilled in the art without departing from the invention. It should be understood that various alternatives to the embodiments of the invention described herein can be employed in practicing the invention. It is intended that the following claims define the scope of the invention and that methods and structures within the scope of these claims and their equivalents be covered thereby.

We claim:

1. A recombinant antibody or an antigen-binding fragment thereof that specifically binds ST2, comprising:
(i) a light chain variable region having at least 85% sequence identity to an amino acid sequence selected from the group consisting of:
amino acids 21-132 of SEQ ID NO: 241, amino acids 21-132 of SEQ ID NO: 243,
amino acids 21-128 of SEQ ID NO: 245, amino acids 21-127 of SEQ ID NO: 247,
amino acids 21-127 of SEQ ID NO: 249, amino acids 21-127 of SEQ ID NO: 251,
amino acids 21-131 of SEQ ID NO: 253, amino acids 21-132 of SEQ ID NO: 255,
amino acids 21-127 of SEQ ID NO: 257, amino acids 21-132 of SEQ ID NO: 259,
amino acids 21-127 of SEQ ID NO: 261, amino acids 21-127 of SEQ ID NO: 263,
amino acids 21-132 of SEQ ID NO: 265, amino acids 21-132 of SEQ ID NO: 267,
amino acids 21-127 of SEQ ID NO: 269, amino acids 21-127 of SEQ ID NO: 271,
amino acids 21-127 of SEQ ID NO: 273, amino acids 21-127 of SEQ ID NO: 275,
amino acids 21-127 of SEQ ID NO: 277, amino acids 21-127 of SEQ ID NO: 279,
amino acids 21-127 of SEQ ID NO: 281, amino acids 21-127 of SEQ ID NO: 283,
amino acids 21-127 of SEQ ID NO: 285, amino acids 21-132 of SEQ ID NO: 287,
amino acids 21-127 of SEQ ID NO: 289, amino acids 21-133 of SEQ ID NO: 291,
amino acids 21-127 of SEQ ID NO: 293, amino acids 21-132 of SEQ ID NO: 295,
amino acids 21-127 of SEQ ID NO: 297, amino acids 21-132 of SEQ ID NO: 299,
amino acids 21-127 of SEQ ID NO: 301, amino acids 21-127 of SEQ ID NO: 303,
amino acids 21-132 of SEQ ID NO: 305, amino acids 21-127 of SEQ ID NO: 307,
amino acids 21-127 of SEQ ID NO: 309, amino acids 21-127 of SEQ ID NO: 311,
amino acids 21-127 of SEQ ID NO: 313, amino acids 21-128 of SEQ ID NO: 315,
amino acids 21-132 of SEQ ID NO: 317, amino acids 21-127 of SEQ ID NO: 319,
amino acids 21-133 of SEQ ID NO: 321, amino acids 21-127 of SEQ ID NO: 323,
amino acids 21-127 of SEQ ID NO: 325, amino acids 21-127 of SEQ ID NO: 327,
amino acids 21-127 of SEQ ID NO: 329, amino acids 21-127 of SEQ ID NO: 331,
amino acids 21-127 of SEQ ID NO: 333, amino acids 21-127 of SEQ ID NO: 335,
amino acids 21-127 of SEQ ID NO: 337, amino acids 21-127 of SEQ ID NO: 339,
amino acids 21-128 of SEQ ID NO: 341, amino acids 21-131 of SEQ ID NO: 343,
amino acids 21-127 of SEQ ID NO: 345, amino acids 21-131 of SEQ ID NO: 347,
amino acids 21-132 of SEQ ID NO: 349, amino acids 21-127 of SEQ ID NO: 351,
amino acids 21-127 of SEQ ID NO: 353, amino acids 21-127 of SEQ ID NO: 355,
amino acids 21-127 of SEQ ID NO: 357, amino acids 21-127 of SEQ ID NO: 359,
amino acids 21-132 of SEQ ID NO: 361, amino acids 21-133 of SEQ ID NO: 363,
amino acids 21-132 of SEQ ID NO: 365, amino acids 21-126 of SEQ ID NO: 367,
amino acids 21-127 of SEQ ID NO: 369, amino acids 21-132 of SEQ ID NO: 371,
amino acids 21-127 of SEQ ID NO: 373, amino acids 21-132 of SEQ ID NO: 375,
amino acids 21-132 of SEQ ID NO: 377, amino acids 21-128 of SEQ ID NO: 379,
amino acids 21-127 of SEQ ID NO: 381, amino acids 21-127 of SEQ ID NO: 383,
amino acids 21-127 of SEQ ID NO: 385, amino acids 21-127 of SEQ ID NO: 387,
amino acids 21-127 of SEQ ID NO: 389, amino acids 21-127 of SEQ ID NO: 391,
amino acids 21-133 of SEQ ID NO: 393, amino acids 21-127 of SEQ ID NO: 395,
amino acids 21-127 of SEQ ID NO: 397, amino acids 21-132 of SEQ ID NO: 399,
amino acids 21-127 of SEQ ID NO: 401, amino acids 21-127 of SEQ ID NO: 403,
amino acids 21-127 of SEQ ID NO: 405, amino acids 21-132 of SEQ ID NO: 407,
amino acids 21-127 of SEQ ID NO: 409, amino acids 21-127 of SEQ ID NO: 411,
amino acids 21-127 of SEQ ID NO: 413, amino acids 21-127 of SEQ ID NO: 415,
amino acids 21-127 of SEQ ID NO: 417, amino acids 21-132 of SEQ ID NO: 419,
amino acids 21-127 of SEQ ID NO: 421, amino acids 21-133 of SEQ ID NO: 423,
amino acids 21-132 of SEQ ID NO: 425, amino acids 21-128 of SEQ ID NO: 427,
amino acids 21-132 of SEQ ID NO: 429, amino acids 21-132 of SEQ ID NO: 431,
amino acids 21-127 of SEQ ID NO: 433, amino acids 21-127 of SEQ ID NO: 435,
amino acids 21-127 of SEQ ID NO: 437, amino acids 21-127 of SEQ ID NO: 439,
amino acids 21-126 of SEQ ID NO: 441, amino acids 21-132 of SEQ ID NO: 443,
amino acids 21-127 of SEQ ID NO: 445, amino acids 21-127 of SEQ ID NO: 447,
amino acids 21-127 of SEQ ID NO: 449, amino acids 21-128 of SEQ ID NO: 451,
amino acids 21-127 of SEQ ID NO: 453, amino acids 21-127 of SEQ ID NO: 455 and
amino acids 21-133 of SEQ ID NO: 457; and
(ii) a heavy chain variable region having at least 90% sequence identity to an amino acid sequence selected from the group consisting of:
amino acids 25-147 of SEQ ID NO: 23, amino acids 25-147 of SEQ ID NO: 25,
amino acids 25-145 of SEQ ID NO: 27, amino acids 25-148 of SEQ ID NO: 29,
amino acids 25-141 of SEQ ID NO: 31, amino acids 25-143 of SEQ ID NO: 33,
amino acids 25-150 of SEQ ID NO: 35, amino acids 25-148 of SEQ ID NO: 37,
amino acids 25-146 of SEQ ID NO: 39, amino acids 25-145 of SEQ ID NO: 41,
amino acids 25-143 of SEQ ID NO: 43, amino acids 25-151 of SEQ ID NO: 45,
amino acids 25-141 of SEQ ID NO: 47, amino acids 25-140 of SEQ ID NO: 49,
amino acids 25-145 of SEQ ID NO: 51, amino acids 25-152 of SEQ ID NO: 53,
amino acids 25-142 of SEQ ID NO: 55, amino acids 25-147 of SEQ ID NO: 57,
amino acids 25-141 of SEQ ID NO: 59, amino acids 25-148 of SEQ ID NO: 61,
amino acids 25-142 of SEQ ID NO: 63, amino acids 25-145 of SEQ ID NO: 65,
amino acids 25-140 of SEQ ID NO: 67, amino acids 25-145 of SEQ ID NO: 69,
amino acids 25-140 of SEQ ID NO: 71, amino acids 25-140 of SEQ ID NO: 73,
amino acids 25-145 of SEQ ID NO: 75, amino acids 25-143 of SEQ ID NO: 77,
amino acids 25-143 of SEQ ID NO: 79, amino acids 25-151 of SEQ ID NO: 81,
amino acids 25-142 of SEQ ID NO: 83, amino acids 25-144 of SEQ ID NO: 85,
amino acids 25-148 of SEQ ID NO: 87, amino acids 25-144 of SEQ ID NO: 89,
amino acids 25-140 of SEQ ID NO: 91, amino acids 25-143 of SEQ ID NO: 93,
amino acids 25-150 of SEQ ID NO: 95, amino acids 25-147 of SEQ ID NO: 97,
amino acids 25-141 of SEQ ID NO: 99, amino acids 25-153 of SEQ ID NO: 101,
amino acids 25-152 of SEQ ID NO: 103, amino acids 25-145 of SEQ ID NO: 105,
amino acids 25-144 of SEQ ID NO: 107, amino acids 25-146 of SEQ ID NO: 109,
amino acids 25-140 of SEQ ID NO: 111, amino acids 25-143 of SEQ ID NO: 113,
amino acids 25-144 of SEQ ID NO: 115, amino acids 25-141 of SEQ ID NO: 117,
amino acids 25-149 of SEQ ID NO: 119, amino acids 25-145 of SEQ ID NO: 121,
amino acids 25-149 of SEQ ID NO: 123, amino acids 25-149 of SEQ ID NO: 125,
amino acids 25-147 of SEQ ID NO: 127, amino acids 25-147 of SEQ ID NO: 129,
amino acids 25-145 of SEQ ID NO: 131, amino acids 25-146 of SEQ ID NO: 133,
amino acids 25-152 of SEQ ID NO: 135, amino acids 25-146 of SEQ ID NO: 137,
amino acids 25-149 of SEQ ID NO: 139, amino acids 25-149 of SEQ ID NO: 141,
amino acids 25-145 of SEQ ID NO: 143, amino acids 25-142 of SEQ ID NO: 145,
amino acids 25-147 of SEQ ID NO: 147, amino acids 25-141 of SEQ ID NO: 149,
amino acids 25-140 of SEQ ID NO: 151, amino acids 25-145 of SEQ ID NO: 153,
amino acids 25-153 of SEQ ID NO: 155, amino acids 25-146 of SEQ ID NO: 157,
amino acids 25-149 of SEQ ID NO: 159, amino acids 25-141 of SEQ ID NO: 161,
amino acids 25-156 of SEQ ID NO: 163, amino acids 25-141 of SEQ ID NO: 165,
amino acids 25-140 of SEQ ID NO: 167, amino acids 25-140 of SEQ ID NO: 169,
amino acids 25-141 of SEQ ID NO: 171, amino acids 25-140 of SEQ ID NO: 173,
amino acids 25-144 of SEQ ID NO: 175, amino acids 25-142 of SEQ ID NO: 177,
amino acids 25-145 of SEQ ID NO: 179, amino acids 25-145 of SEQ ID NO: 181,
amino acids 25-143 of SEQ ID NO: 183, amino acids 25-147 of SEQ ID NO: 185,
amino acids 25-143 of SEQ ID NO: 187, amino acids 25-145 of SEQ ID NO: 189,
amino acids 25-144 of SEQ ID NO: 191, amino acids 25-143 of SEQ ID NO: 193,
amino acids 25-146 of SEQ ID NO: 195, amino acids 25-141 of SEQ ID NO: 197,
amino acids 25-146 of SEQ ID NO: 199, amino acids 25-142 of SEQ ID NO: 201,
amino acids 25-139 of SEQ ID NO: 203, amino acids 25-144 of SEQ ID NO: 205,
amino acids 25-146 of SEQ ID NO: 207, amino acids 25-142 of SEQ ID NO: 209,
amino acids 25-151 of SEQ ID NO: 211, amino acids 25-141 of SEQ ID NO: 213,
amino acids 25-140 of SEQ ID NO: 215, amino acids 25-146 of SEQ ID NO: 217,
amino acids 25-142 of SEQ ID NO: 219, amino acids 25-143 of SEQ ID NO: 221,
amino acids 25-150 of SEQ ID NO: 223, amino acids 25-144 of SEQ ID NO: 225,
amino acids 25-145 of SEQ ID NO: 227, amino acids 25-149 of SEQ ID NO: 229,
amino acids 25-147 of SEQ ID NO: 231, amino acids 25-140 of SEQ ID NO: 233,
amino acids 25-141 of SEQ ID NO: 235, amino acids 25-140 of SEQ ID NO: 237, and
amino acids 25-150 of SEQ ID NO: 239.

2. The antibody or antigen-binding fragment of claim 1, comprising:
a light chain variable region comprising amino acids 21-132 of SEQ ID NO: 241 and a heavy chain variable region comprising amino acids 25-147 of SEQ ID NO: 23;
a light chain variable region comprising amino acids 21-132 of SEQ ID NO: 243 and a heavy chain variable region comprising amino acids 25-147 of SEQ ID NO: 25;
a light chain variable region comprising amino acids 21-128 of SEQ ID NO: 245 and a heavy chain variable region comprising amino acids 25-145 of SEQ ID NO: 27;
a light chain variable region comprising amino acids 21-127 of SEQ ID NO: 247 and a heavy chain variable region comprising amino acids 25-148 of SEQ ID NO: 29;
a light chain variable region comprising amino acids 21-127 of SEQ ID NO: 249 and a heavy chain variable region comprising amino acids 25-141 of SEQ ID NO: 31;
a light chain variable region comprising amino acids 21-127 of SEQ ID NO: 251 and a heavy chain variable region comprising amino acids 25-143 of SEQ ID NO: 33;
a light chain variable region comprising amino acids 21-131 of SEQ ID NO: 253 and a heavy chain variable region comprising amino acids 25-150 of SEQ ID NO: 35;
a light chain variable region comprising amino acids 21-132 of SEQ ID NO: 255 and a heavy chain variable region comprising amino acids 25-148 of SEQ ID NO: 37;
a light chain variable region comprising amino acids 21-127 of SEQ ID NO: 257 and a heavy chain variable region comprising amino acids 25-146 of SEQ ID NO: 39;
a light chain variable region comprising amino acids 21-132 of SEQ ID NO: 259 and a heavy chain variable region comprising amino acids 25-145 of SEQ ID NO: 41;
a light chain variable region comprising amino acids 21-127 of SEQ ID NO: 261 and a heavy chain variable region comprising amino acids 25-143 of SEQ ID NO: 43;
a light chain variable region comprising amino acids 21-127 of SEQ ID NO: 263 and a heavy chain variable region comprising amino acids 25-151 of SEQ ID NO: 45;
a light chain variable region comprising amino acids 21-132 of SEQ ID NO: 265 and a heavy chain variable region comprising amino acids 25-141 of SEQ ID NO: 47;
a light chain variable region comprising amino acids 21-132 of SEQ ID NO: 267 and a heavy chain variable region comprising amino acids 25-140 of SEQ ID NO: 49;
a light chain variable region comprising amino acids 21-127 of SEQ ID NO: 269 and a heavy chain variable region comprising amino acids 25-145 of SEQ ID NO: 51;
a light chain variable region comprising amino acids 1-127 of SEQ ID NO: 271 and a heavy chain variable region comprising amino acids 25-152 of SEQ ID NO: 53;
a light chain variable region comprising amino acids 21-127 of SEQ ID NO: 273 and a heavy chain variable region comprising amino acids 25-142 of SEQ ID NO: 55;
a light chain variable region comprising amino acids 21-127 of SEQ ID NO: 275 and a heavy chain variable region comprising amino acids 25-147 of SEQ ID NO: 57;
a light chain variable region comprising amino acids 21-127 of SEQ ID NO: 277 and a heavy chain variable region comprising amino acids 25-141 of SEQ ID NO: 59;
a light chain variable region comprising amino acids 21-127 of SEQ ID NO: 279 and a heavy chain variable region comprising amino acids 25-148 of SEQ ID NO: 61;
a light chain variable region comprising amino acids 21-127 of SEQ ID NO: 281 and a heavy chain variable region comprising amino acids 25-142 of SEQ ID NO: 63;
a light chain variable region comprising amino acids 21-127 of SEQ ID NO: 283 and a heavy chain variable region comprising amino acids 25-145 of SEQ ID NO: 65;
a light chain variable region comprising amino acids 21-127 of SEQ ID NO: 285 and a heavy chain variable region comprising amino acids 25-140 of SEQ ID NO: 67;
a light chain variable region comprising amino acids 21-132 of SEQ ID NO: 287 and a heavy chain variable region comprising amino acids 25-145 of SEQ ID NO: 69;
a light chain variable region comprising amino acids 21-127 of SEQ ID NO: 289 and a heavy chain variable region comprising amino acids 25-140 of SEQ ID NO: 71;
a light chain variable region comprising amino acids 21-133 of SEQ ID NO: 291 and a heavy chain variable region comprising amino acids 25-140 of SEQ ID NO: 73;
a light chain variable region comprising amino acids 21-127 of SEQ ID NO: 293 and a heavy chain variable region comprising amino acids 25-145 of SEQ ID NO: 75;
a light chain variable region comprising amino acids 21-132 of SEQ ID NO: 295 and a heavy chain variable region comprising amino acids 25-143 of SEQ ID NO: 77;
a light chain variable region comprising amino acids 21-127 of SEQ ID NO: 297 and a heavy chain variable region comprising amino acids 25-143 of SEQ ID NO: 79;
a light chain variable region comprising amino acids 21-132 of SEQ ID NO: 299 and a heavy chain variable region comprising amino acids 25-151 of SEQ ID NO: 81;
a light chain variable region comprising amino acids 21-127 of SEQ ID NO: 301 and a heavy chain variable region comprising amino acids 25-142 of SEQ ID NO: 83;
a light chain variable region comprising amino acids 21-127 of SEQ ID NO: 303 and a heavy chain variable region comprising amino acids 25-144 of SEQ ID NO: 85;
a light chain variable region comprising amino acids 21-132 of SEQ ID NO: 305 and a heavy chain variable region comprising amino acids 25-148 of SEQ ID NO: 87;
a light chain variable region comprising amino acids 21-127 of SEQ ID NO: 307 and a heavy chain variable region comprising amino acids 25-144 of SEQ ID NO: 89;
a light chain variable region comprising amino acids 21-127 of SEQ ID NO: 309 and a heavy chain variable region comprising amino acids 25-140 of SEQ ID NO: 91;
a light chain variable region comprising amino acids 21-127 of SEQ ID NO: 311 and a heavy chain variable region comprising amino acids 25-143 of SEQ ID NO: 93;
a light chain variable region comprising amino acids 21-127 of SEQ ID NO: 313 and a heavy chain variable region comprising amino acids 25-150 of SEQ ID NO: 95;
a light chain variable region comprising amino acids 21-128 of SEQ ID NO: 315 and a heavy chain variable region comprising amino acids 25-147 of SEQ ID NO: 97;
a light chain variable region comprising amino acids 21-132 of SEQ ID NO: 317 and a heavy chain variable region comprising amino acids 25-141 of SEQ ID NO: 99;
a light chain variable region comprising amino acids 21-127 of SEQ ID NO: 319 and a heavy chain variable region comprising amino acids 25-153 of SEQ ID NO: 101;
a light chain variable region comprising amino acids 21-133 of SEQ ID NO: 321 and a heavy chain variable region comprising amino acids 25-152 of SEQ ID NO: 103;
a light chain variable region comprising amino acids 21-127 of SEQ ID NO: 323 and a heavy chain variable region comprising amino acids 25-145 of SEQ ID NO: 105;
a light chain variable region comprising amino acids 21-127 of SEQ ID NO: 325 and a heavy chain variable region comprising amino acids 25-144 of SEQ ID NO: 107;
a light chain variable region comprising amino acids 21-127 of SEQ ID NO: 327 and a heavy chain variable region comprising amino acids 25-146 of SEQ ID NO: 109;
a light chain variable region comprising amino acids 21-127 of SEQ ID NO: 329 and a heavy chain variable region comprising amino acids 25-140 of SEQ ID NO: 111;
a light chain variable region comprising amino acids 21-127 of SEQ ID NO: 331 and a heavy chain variable region comprising amino acids 25-143 of SEQ ID NO: 113;
a light chain variable region comprising amino acids 21-127 of SEQ ID NO: 333 and a heavy chain variable region comprising amino acids 25-144 of SEQ ID NO: 115;
a light chain variable region comprising amino acids 21-127 of SEQ ID NO: 335 and a heavy chain variable region comprising amino acids 25-141 of SEQ ID NO: 117;
a light chain variable region comprising amino acids 21-127 of SEQ ID NO: 337 and a heavy chain variable region comprising amino acids 25-149 of SEQ ID NO: 119;
a light chain variable region comprising amino acids 21-127 of SEQ ID NO: 339 and a heavy chain variable region comprising amino acids 25-145 of SEQ ID NO: 121;
a light chain variable region comprising amino acids 21-128 of SEQ ID NO: 341 and a heavy chain variable region comprising amino acids 25-149 of SEQ ID NO: 123;
a light chain variable region comprising amino acids 21-131 of SEQ ID NO: 343 and a heavy chain variable region comprising amino acids 25-149 of SEQ ID NO: 125;
a light chain variable region comprising amino acids 21-127 of SEQ ID NO: 345 and a heavy chain variable region comprising amino acids 25-147 of SEQ ID NO: 127;
a light chain variable region comprising amino acids 21-131 of SEQ ID NO: 347 and a heavy chain variable region comprising amino acids 25-147 of SEQ ID NO: 129;
a light chain variable region comprising amino acids 21-132 of SEQ ID NO: 349 and a heavy chain variable region comprising amino acids 25-145 of SEQ ID NO: 131;
a light chain variable region comprising amino acids 21-127 of SEQ ID NO: 351 and a heavy chain variable region comprising amino acids 25-146 of SEQ ID NO: 133;
a light chain variable region comprising amino acids 21-127 of SEQ ID NO: 353 and a heavy chain variable region comprising amino acids 25-152 of SEQ ID NO: 135;
a light chain variable region comprising amino acids 21-127 of SEQ ID NO: 355 and a heavy chain variable region comprising amino acids 25-146 of SEQ ID NO: 137;
a light chain variable region comprising amino acids 21-127 of SEQ ID NO: 357 and a heavy chain variable region comprising amino acids 25-149 of SEQ ID NO: 139;
a light chain variable region comprising amino acids 21-127 of SEQ ID NO: 359 and a heavy chain variable region comprising amino acids 25-149 of SEQ ID NO: 141;
a light chain variable region comprising amino acids 21-132 of SEQ ID NO: 361 and a heavy chain variable region comprising amino acids 25-145 of SEQ ID NO: 143;
a light chain variable region comprising amino acids 21-133 of SEQ ID NO: 363 and a heavy chain variable region comprising amino acids 25-142 of SEQ ID NO: 145;
a light chain variable region comprising amino acids 21-132 of SEQ ID NO: 365 and a heavy chain variable region comprising amino acids 25-147 of SEQ ID NO: 147;
a light chain variable region comprising amino acids 21-126 of SEQ ID NO: 367 and a heavy chain variable region comprising amino acids 25-141 of SEQ ID NO: 149;
a light chain variable region comprising amino acids 21-127 of SEQ ID NO: 369 and a heavy chain variable region comprising amino acids 25-140 of SEQ ID NO: 151;
a light chain variable region comprising amino acids 21-132 of SEQ ID NO: 371 and a heavy chain variable region comprising amino acids 25-145 of SEQ ID NO: 153;
a light chain variable region comprising amino acids 21-127 of SEQ ID NO: 373 and a heavy chain variable region comprising amino acids 25-153 of SEQ ID NO: 155;
a light chain variable region comprising amino acids 21-132 of SEQ ID NO: 375 and a heavy chain variable region comprising amino acids 25-146 of SEQ ID NO: 157;
a light chain variable region comprising amino acids 21-132 of SEQ ID NO: 377 and a heavy chain variable region comprising amino acids 25-149 of SEQ ID NO: 159;
a light chain variable region comprising amino acids 21-128 of SEQ ID NO: 379 and a heavy chain variable region comprising amino acids 25-141 of SEQ ID NO: 161;
a light chain variable region comprising amino acids 21-127 of SEQ ID NO: 381 and a heavy chain variable region comprising amino acids 25-156 of SEQ ID NO: 163;
a light chain variable region comprising amino acids 21-127 of SEQ ID NO: 383 and a heavy chain variable region comprising amino acids 25-141 of SEQ ID NO: 165;
a light chain variable region comprising amino acids 21-127 of SEQ ID NO: 385 and a heavy chain variable region comprising amino acids 25-140 of SEQ ID NO: 167;
a light chain variable region comprising amino acids 21-127 of SEQ ID NO: 387 and a heavy chain variable region comprising amino acids 25-140 of SEQ ID NO: 169;
a light chain variable region comprising amino acids 21-127 of SEQ ID NO: 389 and a heavy chain variable region comprising amino acids 25-141 of SEQ ID NO: 171;
a light chain variable region comprising amino acids 21-127 of SEQ ID NO: 391 and a heavy chain variable region comprising amino acids 25-140 of SEQ ID NO: 173;
a light chain variable region comprising amino acids 21-133 of SEQ ID NO: 393 and a heavy chain variable region comprising amino acids 25-144 of SEQ ID NO: 175;
a light chain variable region comprising amino acids 21-127 of SEQ ID NO: 395 and a heavy chain variable region comprising amino acids 25-142 of SEQ ID NO: 177;
a light chain variable region comprising amino acids 21-127 of SEQ ID NO: 397 and a heavy chain variable region comprising amino acids 25-145 of SEQ ID NO: 179;
a light chain variable region comprising amino acids 21-132 of SEQ ID NO: 399 and a heavy chain variable region comprising amino acids 25-145 of SEQ ID NO: 181;
a light chain variable region comprising amino acids 21-127 of SEQ ID NO: 401 and a heavy chain variable region comprising amino acids 25-143 of SEQ ID NO: 183;
a light chain variable region comprising amino acids 21-127 of SEQ ID NO: 403 and a heavy chain variable region comprising amino acids 25-147 of SEQ ID NO: 185;
a light chain variable region comprising amino acids 21-127 of SEQ ID NO: 405 and a heavy chain variable region comprising amino acids 25-143 of SEQ ID NO: 187;
a light chain variable region comprising amino acids 21-132 of SEQ ID NO: 407 and a heavy chain variable region comprising amino acids 25-145 of SEQ ID NO: 189;
a light chain variable region comprising amino acids 21-127 of SEQ ID NO: 409 and a heavy chain variable region comprising amino acids 25-144 of SEQ ID NO: 191;
a light chain variable region comprising amino acids 21-127 of SEQ ID NO: 411 and a heavy chain variable region comprising amino acids 25-143 of SEQ ID NO: 193;
a light chain variable region comprising amino acids 21-127 of SEQ ID NO: 413 and a heavy chain variable region comprising amino acids 25-146 of SEQ ID NO: 195;
a light chain variable region comprising amino acids 21-127 of SEQ ID NO: 415 and a heavy chain variable region comprising amino acids 25-141 of SEQ ID NO: 197;
a light chain variable region comprising amino acids 21-127 of SEQ ID NO: 417 and a heavy chain variable region comprising amino acids 25-146 of SEQ ID NO: 199;
a light chain variable region comprising amino acids 21-132 of SEQ ID NO: 419 and a heavy chain variable region comprising amino acids 25-142 of SEQ ID NO: 201;
a light chain variable region comprising amino acids 21-127 of SEQ ID NO: 421 and a heavy chain variable region comprising amino acids 25-139 of SEQ ID NO: 203;
a light chain variable region comprising amino acids 21-133 of SEQ ID NO: 423 and a heavy chain variable region comprising amino acids 25-144 of SEQ ID NO: 205;
a light chain variable region comprising amino acids 21-132 of SEQ ID NO: 425 and a heavy chain variable region comprising amino acids 25-146 of SEQ ID NO: 207;
a light chain variable region comprising amino acids 21-128 of SEQ ID NO: 427 and a heavy chain variable region comprising amino acids 25-142 of SEQ ID NO: 209;
a light chain variable region comprising amino acids 21-132 of SEQ ID NO: 429 and a heavy chain variable region comprising amino acids 25-151 of SEQ ID NO: 211;
a light chain variable region comprising amino acids 21-132 of SEQ ID NO: 431 and a heavy chain variable region comprising amino acids 25-141 of SEQ ID NO: 213;
a light chain variable region comprising amino acids 21-127 of SEQ ID NO: 433 and a heavy chain variable region comprising amino acids 25-140 of SEQ ID NO: 215;
a light chain variable region comprising amino acids 21-127 of SEQ ID NO: 435 and a heavy chain variable region comprising amino acids 25-146 of SEQ ID NO: 217;
a light chain variable region comprising amino acids 21-127 of SEQ ID NO: 437 and a heavy chain variable region comprising amino acids 25-142 of SEQ ID NO: 219;
a light chain variable region comprising amino acids 21-127 of SEQ ID NO: 439 and a heavy chain variable region comprising amino acids 25-143 of SEQ ID NO: 221;
a light chain variable region comprising amino acids 21-126 of SEQ ID NO: 441 and a heavy chain variable region comprising amino acids 25-150 of SEQ ID NO: 223;
a light chain variable region comprising amino acids 21-132 of SEQ ID NO: 443 and a heavy chain variable region comprising amino acids 25-144 of SEQ ID NO: 225;
a light chain variable region comprising amino acids 21-127 of SEQ ID NO: 445 and a heavy chain variable region comprising amino acids 25-145 of SEQ ID NO: 227;
a light chain variable region comprising amino acids 21-127 of SEQ ID NO: 447 and a heavy chain variable region comprising amino acids 25-149 of SEQ ID NO: 229;
a light chain variable region comprising amino acids 21-127 of SEQ ID NO: 449 and a heavy chain variable region comprising amino acids 251-147 of SEQ ID NO: 231;
a light chain variable region comprising amino acids 21-128 of SEQ ID NO: 451 and a heavy chain variable region comprising amino acids 25-140 of SEQ ID NO: 233;
a light chain variable region comprising amino acids 21-127 of SEQ ID NO: 453 and a heavy chain variable region comprising amino acids 25-141 of SEQ ID NO: 235;
a light chain variable region comprising amino acids 21-127 of SEQ ID NO: 455 and a heavy chain variable region comprising amino acids 25-140 of SEQ ID NO: 237; or
a light chain variable region comprising amino acids 21-133 of SEQ ID NO: 457 and a heavy chain variable region comprising amino acids 25-150 of SEQ ID NO: 239.

3. The antibody or antigen-binding fragment of claim 1, comprising a heavy chain fragment selected from the group consisting of:
amino acids 25-251 of SEQ ID NO: 23, amino acids 25-250 of SEQ ID NO: 25, amino acids 25-249 of SEQ ID NO: 27, amino acids 25-252 of SEQ ID NO: 29, amino acids 25-245 of SEQ ID NO: 31, amino acids 25-247 of SEQ ID NO: 33, amino acids 25-254 of SEQ ID NO: 35, amino acids 25-252 of SEQ ID NO: 37, amino acids 25-250 of SEQ ID NO: 39, amino acids 25-249 of SEQ ID NO: 41, amino acids 25-248 of SEQ ID NO: 43, amino acids 25-255 of SEQ ID NO: 45, amino acids 25-245 of SEQ ID NO: 47, amino acids 25-244 of SEQ ID NO: 49, amino acids 25-249 of SEQ ID NO: 51, amino acids 25-256 of SEQ ID NO: 53, amino acids 25-246 of SEQ ID NO: 55, amino acids 25-251 of SEQ ID NO: 57, amino acids 25-245 of SEQ ID NO: 59, amino acids 25-252 of SEQ ID NO: 61, amino acids 25-246 of SEQ ID NO: 63, amino acids 25-249 of SEQ ID NO: 65, amino acids 25-244 of SEQ ID NO: 67, amino acids 25-249 of SEQ ID NO: 69, amino acids 25-244 of SEQ ID NO: 71, amino acids 25-244 of SEQ ID NO: 73, amino acids 25-249 of SEQ ID NO: 75, amino acids 25-247 of SEQ ID NO: 77, amino acids 25-247 of SEQ ID NO: 79, amino acids 25-255 of SEQ ID NO: 81, amino acids 25-246 of SEQ ID NO: 83, amino acids 25-248 of SEQ ID NO: 85, amino acids 25-252 of SEQ ID NO: 87, amino acids 25-248 of SEQ ID NO: 89, amino acids 25-244 of SEQ ID NO: 91, amino acids 25-247 of SEQ ID NO: 93, amino acids 25-254 of SEQ ID NO: 95, amino acids 25-251 of SEQ ID NO: 97, amino acids 25-245 of SEQ ID NO: 99, amino acids 25-257 of SEQ ID NO: 101, amino acids 25-256 of SEQ ID NO: 103, amino acids 25-249 of SEQ ID NO: 105, amino acids 25-248 of SEQ ID NO: 107, amino acids 25-250 of SEQ ID NO: 109, amino acids 25-244 of SEQ ID NO: 111, amino acids 25-247 of SEQ ID NO: 113, amino acids 25-248 of SEQ ID NO: 115, amino acids 25-245 of SEQ ID NO: 117, amino acids 25-253 of SEQ ID NO: 119, amino acids 25-249 of SEQ ID NO: 121, amino acids 25-253 of SEQ ID NO: 123, amino acids 25-253 of SEQ ID NO: 125, amino acids 25-251 of SEQ ID NO: 127, amino acids 25-245 of SEQ ID NO: 129, amino acids 25-249 of SEQ ID NO: 131, amino acids 25-250 of SEQ ID NO: 133, amino acids 25-256 of SEQ ID NO: 135, amino acids 25-250 of SEQ ID NO: 137, amino acids 25-247 of SEQ ID NO: 139, amino acids 25-253 of SEQ ID NO: 141, amino acids 25-249 of SEQ ID NO: 143, amino acids 25-246 of SEQ ID NO: 145, amino acids 25-251 of SEQ ID NO: 147, amino acids 25-245 of SEQ ID NO: 149, amino acids 25-244 of SEQ ID NO: 151, amino acids 25-249 of SEQ ID NO: 153, amino acids 25-257 of SEQ ID NO: 155, amino acids 25-250 of SEQ ID NO: 157, amino acids 25-253 of SEQ ID NO: 159, amino acids 25-245 of SEQ ID NO: 161, amino acids 25-260 of SEQ ID NO: 163, amino acids 25-245 of SEQ ID NO: 165, amino acids 25-244 of SEQ ID NO: 167, amino acids 25-244 of SEQ ID NO: 169, amino acids 25-245 of SEQ ID NO: 171, amino acids 25-244 of SEQ ID NO: 173, amino acids 25-248 of SEQ ID NO: 175, amino acids 25-246 of SEQ ID NO: 177, amino acids 1-249 of SEQ ID NO: 179, amino acids 1-249 of SEQ ID NO: 181, amino acids 1-247 of SEQ ID NO: 183, amino acids 1-251 of SEQ ID NO: 185, amino acids 1-247 of SEQ ID NO: 187, amino acids 25-249 of SEQ ID NO: 189, amino acids 25-248 of SEQ ID NO: 191, amino acids 25-246 of SEQ ID NO: 193, amino acids 25-250 of SEQ ID NO: 195, amino acids 25-245 of SEQ ID NO: 197, amino acids 25-250 of SEQ ID NO: 199, amino acids 25-246 of SEQ ID NO: 201, amino acids 25-243 of SEQ ID NO: 203, amino acids 25-248 of SEQ ID NO: 205, amino acids 25-250 of SEQ ID NO: 207, amino acids 25-249 of SEQ ID NO: 209, amino acids 25-255 of SEQ ID NO: 211, amino acids 25-245 of SEQ ID NO: 213, amino acids 25-244 of SEQ ID NO: 215, amino acids 25-250 of SEQ ID NO: 217, amino acids 25-249 of SEQ ID NO: 219, amino acids 25-247 of SEQ ID NO: 221, amino acids 25-254 of SEQ ID NO: 223, amino acids 25-248 of SEQ ID NO: 225, amino acids 25-249 of SEQ ID NO: 227, amino acids 25-253 of SEQ ID NO: 229, amino acids 25-251 of SEQ ID NO: 231, amino acids 25-244 of SEQ ID NO: 233, amino acids 25-245 of SEQ ID NO: 235, amino acids 25-244 of SEQ ID NO: 237, and amino acids 25-254 of SEQ ID NO: 239.

4. The antibody or antigen-binding fragment of claim 1, comprising:
a heavy chain fragment comprising amino acids 25-251 of SEQ ID NO: 23 and a light chain comprising SEQ ID NO: 241;
a heavy chain fragment comprising amino acids 25-250 of SEQ ID NO: 25 and a light chain comprising SEQ ID NO: 243;
a heavy chain fragment comprising amino acids 25-249 of SEQ ID NO: 27 and a light chain comprising SEQ ID NO: 245;
a heavy chain fragment comprising amino acids 25-252 of SEQ ID NO: 29 and a light chain comprising SEQ ID NO: 247;
a heavy chain fragment comprising amino acids 25-245 of SEQ ID NO: 31 and a light chain comprising SEQ ID NO: 249;
a heavy chain fragment comprising amino acids 25-247 of SEQ ID NO: 33 and a light chain comprising SEQ ID NO: 251;
a heavy chain fragment comprising amino acids 25-254 of SEQ ID NO: 35 and a light chain comprising SEQ ID NO: 253;
a heavy chain fragment comprising amino acids 25-252 of SEQ ID NO: 37 and a light chain comprising SEQ ID NO: 255;
a heavy chain fragment comprising amino acids 25-250 of SEQ ID NO: 39 and a light chain comprising SEQ ID NO: 257;
a heavy chain fragment comprising amino acids 25-249 of SEQ ID NO: 41 and a light chain comprising SEQ ID NO: 259;
a heavy chain fragment comprising amino acids 25-248 of SEQ ID NO: 43 and a light chain comprising SEQ ID NO: 261;
a heavy chain fragment comprising amino acids 25-255 of SEQ ID NO: 45 and a light chain comprising SEQ ID NO: 263;
a heavy chain fragment comprising amino acids 25-245 of SEQ ID NO: 47 and a light chain comprising SEQ ID NO: 265;
a heavy chain fragment comprising amino acids 25-244 of SEQ ID NO: 49 and a light chain comprising SEQ ID NO: 267;
a heavy chain fragment comprising amino acids 25-249 of SEQ ID NO: 51 and a light chain comprising SEQ ID NO: 269;
a heavy chain fragment comprising amino acids 25-256 of SEQ ID NO: 53 and a light chain comprising SEQ ID NO: 271;
a heavy chain fragment comprising amino acids 25-246 of SEQ ID NO: 55 and a light chain comprising SEQ ID NO: 273;
a heavy chain fragment comprising amino acids 25-251 of SEQ ID NO: 57 and a light chain comprising SEQ ID NO: 275;
a heavy chain fragment comprising amino acids 25-245 of SEQ ID NO: 59 and a light chain comprising SEQ ID NO: 277;
a heavy chain fragment comprising amino acids 25-252 of SEQ ID NO: 61 and a light chain comprising SEQ ID NO: 279;
a heavy chain fragment comprising amino acids 25-246 of SEQ ID NO: 63 and a light chain comprising SEQ ID NO: 281;
a heavy chain fragment comprising amino acids 25-249 of SEQ ID NO: 65 and a light chain comprising SEQ ID NO: 283;
a heavy chain fragment comprising amino acids 25-244 of SEQ ID NO: 67 and a light chain comprising SEQ ID NO: 285;
a heavy chain fragment comprising amino acids 25-249 of SEQ ID NO: 69 and a light chain comprising SEQ ID NO: 287;
a heavy chain fragment comprising amino acids 25-244 of SEQ ID NO: 71 and a light chain comprising SEQ ID NO: 289;
a heavy chain fragment comprising amino acids 25-244 of SEQ ID NO: 73 and a light chain comprising SEQ ID NO: 291;
a heavy chain fragment comprising amino acids 25-249 of SEQ ID NO: 75 and a light chain comprising SEQ ID NO: 293;
a heavy chain fragment comprising amino acids 25-247 of SEQ ID NO: 77 and a light chain comprising SEQ ID NO: 295;
a heavy chain fragment comprising amino acids 25-247 of SEQ ID NO: 79 and a light chain comprising SEQ ID NO: 297;
a heavy chain fragment comprising amino acids 25-255 of SEQ ID NO: 81 and a light chain comprising SEQ ID NO: 299;
a heavy chain fragment comprising amino acids 25-246 of SEQ ID NO: 83 and a light chain comprising SEQ ID NO: 301;
a heavy chain fragment comprising amino acids 25-248 of SEQ ID NO: 85 and a light chain comprising SEQ ID NO: 303;
a heavy chain fragment comprising amino acids 25-252 of SEQ ID NO: 87 and a light chain comprising SEQ ID NO: 305;
a heavy chain fragment comprising amino acids 25-248 of SEQ ID NO: 89 and a light chain comprising SEQ ID NO: 307;
a heavy chain fragment comprising amino acids 25-244 of SEQ ID NO: 91 and a light chain comprising SEQ ID NO: 309;
a heavy chain fragment comprising amino acids 25-247 of SEQ ID NO: 93 and a light chain comprising SEQ ID NO: 311;
a heavy chain fragment comprising amino acids 25-254 of SEQ ID NO: 95 and a light chain comprising SEQ ID NO: 313;
a heavy chain fragment comprising amino acids 25-251 of SEQ ID NO: 97 and a light chain comprising SEQ ID NO: 315;
a heavy chain fragment comprising amino acids 25-245 of SEQ ID NO: 99 and a light chain comprising SEQ ID NO: 317;
a heavy chain fragment comprising amino acids 25-257 of SEQ ID NO: 101 and a light chain comprising SEQ ID NO: 319;
a heavy chain fragment comprising amino acids 25-256 of SEQ ID NO: 103 and a light chain comprising SEQ ID NO: 321;
a heavy chain fragment comprising amino acids 25-249 of SEQ ID NO: 105 and a light chain comprising SEQ ID NO: 323;
a heavy chain fragment comprising amino acids 25-248 of SEQ ID NO: 107 and a light chain comprising SEQ ID NO: 325;
a heavy chain fragment comprising amino acids 25-250 of SEQ ID NO: 109 and a light chain comprising SEQ ID NO: 327;
a heavy chain fragment comprising amino acids 25-244 of SEQ ID NO: 111 and a light chain comprising SEQ ID NO: 329;
a heavy chain fragment comprising amino acids 25-247 of SEQ ID NO: 113 and a light chain comprising SEQ ID NO: 331;
a heavy chain fragment comprising amino acids 25-248 of SEQ ID NO: 115 and a light chain comprising SEQ ID NO: 333;
a heavy chain fragment comprising amino acids 25-245 of SEQ ID NO: 117 and a light chain comprising SEQ ID NO: 335;
a heavy chain fragment comprising amino acids 25-253 of SEQ ID NO: 119 and a light chain comprising SEQ ID NO: 337;
a heavy chain fragment comprising amino acids 25-249 of SEQ ID NO: 121 and a light chain comprising SEQ ID NO: 339;
a heavy chain fragment comprising amino acids 25-253 of SEQ ID NO: 123 and a light chain comprising SEQ ID NO: 341
a heavy chain fragment comprising amino acids 25-253 of SEQ ID NO: 125 and a light chain comprising SEQ ID NO: 343;
a heavy chain fragment comprising amino acids 25-251 of SEQ ID NO: 127 and a light chain comprising SEQ ID NO: 345;
a heavy chain fragment comprising amino acids 25-245 of SEQ ID NO: 129 and a light chain comprising SEQ ID NO: 347;
a heavy chain fragment comprising amino acids 25-249 of SEQ ID NO: 131 and a light chain comprising SEQ ID NO: 349;
a heavy chain fragment comprising amino acids 25-250 of SEQ ID NO: 133 and a light chain comprising SEQ ID NO: 351;
a heavy chain fragment comprising amino acids 25-256 of SEQ ID NO: 135 and a light chain comprising SEQ ID NO: 353;
a heavy chain fragment comprising amino acids 25-250 of SEQ ID NO: 137 and a light chain comprising SEQ ID NO: 355;
a heavy chain fragment comprising amino acids 25-247 of SEQ ID NO: 139 and a light chain comprising SEQ ID NO: 357;
a heavy chain fragment comprising amino acids 25-253 of SEQ ID NO: 141 and a light chain comprising SEQ ID NO: 359;
a heavy chain fragment comprising amino acids 25-249 of SEQ ID NO: 143 and a light chain comprising SEQ ID NO: 361;
a heavy chain fragment comprising amino acids 25-246 of SEQ ID NO: 145 and a light chain comprising SEQ ID NO: 363;
a heavy chain fragment comprising amino acids 25-251 of SEQ ID NO: 147 and a light chain comprising SEQ ID NO: 365;
a heavy chain fragment comprising amino acids 25-245 of SEQ ID NO: 149 and a light chain comprising SEQ ID NO: 367;
a heavy chain fragment comprising amino acids 25-244 of SEQ ID NO: 151 and a light chain comprising SEQ ID NO: 369;
a heavy chain fragment comprising amino acids 25-249 of SEQ ID NO: 153 and a light chain comprising SEQ ID NO: 371;
a heavy chain fragment comprising amino acids 25-257 of SEQ ID NO: 155 and a light chain comprising SEQ ID NO: 373;
a heavy chain fragment comprising amino acids 25-250 of SEQ ID NO: 157 and a light chain comprising SEQ ID NO: 375;
a heavy chain fragment comprising amino acids 25-253 of SEQ ID NO: 159 and a light chain comprising SEQ ID NO: 377;
a heavy chain fragment comprising amino acids 25-245 of SEQ ID NO: 161 and a light chain comprising SEQ ID NO: 379;
a heavy chain fragment comprising amino acids 25-260 of SEQ ID NO: 163 and a light chain comprising SEQ ID NO: 381;
a heavy chain fragment comprising amino acids 25-245 of SEQ ID NO: 165 and a light chain comprising SEQ ID NO: 383;
a heavy chain fragment comprising amino acids 25-244 of SEQ ID NO: 167 and a light chain comprising SEQ ID NO: 385;
a heavy chain fragment comprising amino acids 25-244 of SEQ ID NO: 169 and a light chain comprising SEQ ID NO: 387;
a heavy chain fragment comprising amino acids 25-245 of SEQ ID NO: 171 and a light chain comprising SEQ ID NO: 389;
a heavy chain fragment comprising amino acids 25-244 of SEQ ID NO: 173 and a light chain comprising SEQ ID NO: 391;
a heavy chain fragment comprising amino acids 25-248 of SEQ ID NO: 175 and a light chain comprising SEQ ID NO: 393;
a heavy chain fragment comprising amino acids 25-246 of SEQ ID NO: 177 and a light chain comprising SEQ ID NO: 395;
a heavy chain fragment comprising amino acids 25-249 of SEQ ID NO: 179 and a light chain comprising SEQ ID NO: 397;
a heavy chain fragment comprising amino acids 25-249 of SEQ ID NO: 181 and a light chain comprising SEQ ID NO: 399;
a heavy chain fragment comprising amino acids 25-247 of SEQ ID NO: 183 and a light chain comprising SEQ ID NO: 401;
a heavy chain fragment comprising amino acids 25-251 of SEQ ID NO: 185 and a light chain comprising SEQ ID NO: 403;
a heavy chain fragment comprising amino acids 25-247 of SEQ ID NO: 187 and a light chain comprising SEQ ID NO: 405;
a heavy chain fragment comprising amino acids 25-249 of SEQ ID NO: 189 and a light chain comprising SEQ ID NO: 407;
a heavy chain fragment comprising amino acids 25-248 of SEQ ID NO: 191 and a light chain comprising SEQ ID NO: 409;
a heavy chain fragment comprising amino acids 25-246 of SEQ ID NO: 193 and a light chain comprising SEQ ID NO: 411;
a heavy chain fragment comprising amino acids 25-250 of SEQ ID NO: 195 and a light chain comprising SEQ ID NO: 413;
a heavy chain fragment comprising amino acids 25-245 of SEQ ID NO: 197 and a light chain comprising SEQ ID NO: 415;
a heavy chain fragment comprising amino acids 25-250 of SEQ ID NO: 199 and a light chain comprising SEQ ID NO: 417;
a heavy chain fragment comprising amino acids 25-246 of SEQ ID NO: 201 and a light chain comprising SEQ ID NO: 419;
a heavy chain fragment comprising amino acids 25-243 of SEQ ID NO: 203 and a light chain comprising SEQ ID NO: 421;
a heavy chain fragment comprising amino acids 25-248 of SEQ ID NO: 205 and a light chain comprising SEQ ID NO: 423;
a heavy chain fragment comprising amino acids 25-250 of SEQ ID NO: 207 and a light chain comprising SEQ ID NO: 425;
a heavy chain fragment comprising amino acids 25-249 of SEQ ID NO: 209 and a light chain comprising SEQ ID NO: 427;
a heavy chain fragment comprising amino acids 25-255 of SEQ ID NO: 211 and a light chain comprising SEQ ID NO: 429;
a heavy chain fragment comprising amino acids 25-245 of SEQ ID NO: 213 and a light chain comprising SEQ ID NO: 431;
a heavy chain fragment comprising amino acids 25-244 of SEQ ID NO: 215 and a light chain comprising SEQ ID NO: 433;
a heavy chain fragment comprising amino acids 25-250 of SEQ ID NO: 217 and a light chain comprising SEQ ID NO: 435;
a heavy chain fragment comprising amino acids 25-249 of SEQ ID NO: 219 and a light chain comprising SEQ ID NO: 437;
a heavy chain fragment comprising amino acids 25-247 of SEQ ID NO: 221 and a light chain comprising SEQ ID NO: 439;
a heavy chain fragment comprising amino acids 25-254 of SEQ ID NO: 223 and a light chain comprising SEQ ID NO: 441;
a heavy chain fragment comprising amino acids 25-248 of SEQ ID NO: 225 and a light chain comprising SEQ ID NO: 443;
a heavy chain fragment comprising amino acids 25-249 of SEQ ID NO: 227 and a light chain comprising SEQ ID NO: 445;
a heavy chain fragment comprising amino acids 25-253 of SEQ ID NO: 229 and a light chain comprising SEQ ID NO: 447;
a heavy chain fragment comprising amino acids 25-251 of SEQ ID NO: 231 and a light chain comprising SEQ ID NO: 449;
a heavy chain fragment comprising amino acids 25-244 of SEQ ID NO: 233 and a light chain comprising SEQ ID NO: 451;
a heavy chain fragment comprising amino acids 25-245 of SEQ ID NO: 235 and a light chain comprising SEQ ID NO: 453;
a heavy chain fragment comprising amino acids 25-244 of SEQ ID NO: 237 and a light chain comprising SEQ ID NO: 455; or
a heavy chain fragment comprising amino acids 25-254 of SEQ ID NO: 239 and a light chain comprising SEQ ID NO: 457.

5. The antibody or antigen-binding fragment of claim 1, comprising:
(i) a heavy chain amino acid sequence selected from the group consisting of:
SEQ ID NO: 23, SEQ ID NO: 25, SEQ ID NO: 27, SEQ ID NO: 29, SEQ ID NO: 31,
SEQ ID NO: 33, SEQ ID NO: 35, SEQ ID NO: 37, SEQ ID NO: 39, SEQ ID NO: 41,
SEQ ID NO: 43, SEQ ID NO: 45, SEQ ID NO: 47, SEQ ID NO: 49, SEQ ID NO: 51,
SEQ ID NO: 53, SEQ ID NO: 55, SEQ ID NO: 57, SEQ ID NO: 59, SEQ ID NO: 61,
SEQ ID NO: 63, SEQ ID NO: 65, SEQ ID NO: 67, SEQ ID NO: 69, SEQ ID NO: 71,
SEQ ID NO: 73, SEQ ID NO: 75, SEQ ID NO: 77, SEQ ID NO: 79, SEQ ID NO: 81,
SEQ ID NO: 83, SEQ ID NO: 85, SEQ ID NO: 87, SEQ ID NO: 89, SEQ ID NO: 91,
SEQ ID NO: 93, SEQ ID NO: 95, SEQ ID NO: 97, SEQ ID NO: 99, SEQ ID NO: 101,
SEQ ID NO: 103, SEQ ID NO: 105, SEQ ID NO: 107, SEQ ID NO: 109, SEQ ID NO: 111,
SEQ ID NO: 113, SEQ ID NO: 115, SEQ ID NO: 117, SEQ ID NO: 119, SEQ ID NO: 121,
SEQ ID NO: 123, SEQ ID NO: 125, SEQ ID NO: 127, SEQ ID NO: 129, SEQ ID NO: 131,
SEQ ID NO: 133, SEQ ID NO: 135, SEQ ID NO: 137, SEQ ID NO: 139, SEQ ID NO: 141,
SEQ ID NO: 143, SEQ ID NO: 145, SEQ ID NO: 147, SEQ ID NO: 149, SEQ ID NO: 151,
SEQ ID NO: 153, SEQ ID NO: 155, SEQ ID NO: 157, SEQ ID NO: 159, SEQ ID NO: 161,
SEQ ID NO: 163, SEQ ID NO: 165, SEQ ID NO: 167, SEQ ID NO: 169, SEQ ID NO: 171,
SEQ ID NO: 173, SEQ ID NO: 175, SEQ ID NO: 177, SEQ ID NO: 179, SEQ ID NO: 181,
SEQ ID NO: 183, SEQ ID NO: 185, SEQ ID NO: 187, SEQ ID NO: 189, SEQ ID NO: 191,
SEQ ID NO: 193, SEQ ID NO: 195, SEQ ID NO: 197, SEQ ID NO: 199, SEQ ID NO: 201,
SEQ ID NO: 203, SEQ ID NO: 205, SEQ ID NO: 207, SEQ ID NO: 209, SEQ ID NO: 211,
SEQ ID NO: 213, SEQ ID NO: 215, SEQ ID NO: 217, SEQ ID NO: 219, SEQ ID NO: 221,
SEQ ID NO: 223, SEQ ID NO: 225, SEQ ID NO: 227, SEQ ID NO: 229, SEQ ID NO: 231,
SEQ ID NO: 233, SEQ ID NO: 235, SEQ ID NO: 237 and SEQ ID NO: 239; and
(ii) a light chain amino acid sequence selected from the group consisting of:
SEQ ID NO: 241, SEQ ID NO: 243, SEQ ID NO: 245, SEQ ID NO: 247, SEQ ID NO: 249,
SEQ ID NO: 251, SEQ ID NO: 253, SEQ ID NO: 255, SEQ ID NO: 257, SEQ ID NO: 259,
SEQ ID NO: 261, SEQ ID NO: 263, SEQ ID NO: 265, SEQ ID NO: 267, SEQ ID NO: 269,
SEQ ID NO: 271, SEQ ID NO: 273, SEQ ID NO: 275, SEQ ID NO: 277, SEQ ID NO: 279,
SEQ ID NO: 281, SEQ ID NO: 283, SEQ ID NO: 285, SEQ ID NO: 287, SEQ ID NO: 289,
SEQ ID NO: 291, SEQ ID NO: 293, SEQ ID NO: 295, SEQ ID NO: 297, SEQ ID NO: 299,
SEQ ID NO: 301, SEQ ID NO: 303, SEQ ID NO: 305, SEQ ID NO: 307, SEQ ID NO: 309,
SEQ ID NO: 311, SEQ ID NO: 313, SEQ ID NO: 315, SEQ ID NO: 317, SEQ ID NO: 319,
SEQ ID NO: 321, SEQ ID NO: 323, SEQ ID NO: 325, SEQ ID NO: 327, SEQ ID NO: 329,
SEQ ID NO: 331, SEQ ID NO: 333, SEQ ID NO: 335, SEQ ID NO: 337, SEQ ID NO: 339,
SEQ ID NO: 341, SEQ ID NO: 343, SEQ ID NO: 345, SEQ ID NO: 347, SEQ ID NO: 349,
SEQ ID NO: 351, SEQ ID NO: 353, SEQ ID NO: 355, SEQ ID NO: 357, SEQ ID NO: 359,
SEQ ID NO: 361, SEQ ID NO: 363, SEQ ID NO: 365, SEQ ID NO: 367, SEQ ID NO: 369,
SEQ ID NO: 371, SEQ ID NO: 373, SEQ ID NO: 375, SEQ ID NO: 377, SEQ ID NO: 379,
SEQ ID NO: 381, SEQ ID NO: 383, SEQ ID NO: 385, SEQ ID NO: 387, SEQ ID NO: 389,
SEQ ID NO: 391, SEQ ID NO: 393, SEQ ID NO: 395, SEQ ID NO: 397, SEQ ID NO: 399,
SEQ ID NO: 401, SEQ ID NO: 403, SEQ ID NO: 405, SEQ ID NO: 407, SEQ ID NO: 409,
SEQ ID NO: 411, SEQ ID NO: 413, SEQ ID NO: 415, SEQ ID NO: 417, SEQ ID NO: 419,
SEQ ID NO: 421, SEQ ID NO: 423, SEQ ID NO: 425, SEQ ID NO: 427, SEQ ID NO: 429,
SEQ ID NO: 431, SEQ ID NO: 433, SEQ ID NO: 435, SEQ ID NO: 437, SEQ ID NO: 439,
SEQ ID NO: 441, SEQ ID NO: 443, SEQ ID NO: 445, SEQ ID NO: 447, SEQ ID NO: 449,
SEQ ID NO: 451, SEQ ID NO: 453, SEQ ID NO: 455 and SEQ ID NO: 457.

6. An isolated antibody or an antigen-binding fragment thereof that specifically binds ST2, comprising:
(i) a heavy chain variable domain comprising complementarity determining regions (CDRs) as set forth in a heavy chain variable domain amino acid sequence selected from the group consisting of:
amino acids 25-147 of SEQ ID NO: 23, amino acids 25-147 of SEQ ID NO: 25,
amino acids 25-145 of SEQ ID NO: 27, amino acids 25-148 of SEQ ID NO: 29,
amino acids 25-141 of SEQ ID NO: 31, amino acids 25-143 of SEQ ID NO: 33,
amino acids 25-150 of SEQ ID NO: 35, amino acids 25-148 of SEQ ID NO: 37,
amino acids 25-146 of SEQ ID NO: 39, amino acids 25-145 of SEQ ID NO: 41,
amino acids 25-143 of SEQ ID NO: 43, amino acids 25-151 of SEQ ID NO: 45,
amino acids 25-141 of SEQ ID NO: 47, amino acids 25-140 of SEQ ID NO: 49,
amino acids 25-145 of SEQ ID NO: 51, amino acids 25-152 of SEQ ID NO: 53,
amino acids 25-142 of SEQ ID NO: 55, amino acids 25-147 of SEQ ID NO: 57,
amino acids 25-141 of SEQ ID NO: 59, amino acids 25-148 of SEQ ID NO: 61,
amino acids 25-142 of SEQ ID NO: 63, amino acids 25-145 of SEQ ID NO: 65,
amino acids 25-140 of SEQ ID NO: 67, amino acids 25-145 of SEQ ID NO: 69,
amino acids 25-140 of SEQ ID NO: 71, amino acids 25-140 of SEQ ID NO: 73,
amino acids 25-145 of SEQ ID NO: 75, amino acids 25-143 of SEQ ID NO: 77,
amino acids 25-143 of SEQ ID NO: 79, amino acids 25-151 of SEQ ID NO: 81,
amino acids 25-142 of SEQ ID NO: 83, amino acids 25-144 of SEQ ID NO: 85,
amino acids 25-148 of SEQ ID NO: 87, amino acids 25-144 of SEQ ID NO: 89,
amino acids 25-140 of SEQ ID NO: 91, amino acids 25-143 of SEQ ID NO: 93,
amino acids 25-150 of SEQ ID NO: 95, amino acids 25-147 of SEQ ID NO: 97,
amino acids 25-141 of SEQ ID NO: 99, amino acids 25-153 of SEQ ID NO: 101,
amino acids 25-152 of SEQ ID NO: 103, amino acids 25-145 of SEQ ID NO: 105,
amino acids 25-144 of SEQ ID NO: 107, amino acids 25-146 of SEQ ID NO: 109,
amino acids 25-140 of SEQ ID NO: 111, amino acids 25-143 of SEQ ID NO: 113,
amino acids 25-144 of SEQ ID NO: 115, amino acids 25-141 of SEQ ID NO: 117,
amino acids 25-149 of SEQ ID NO: 119, amino acids 25-145 of SEQ ID NO: 121,
amino acids 25-149 of SEQ ID NO: 123, amino acids 25-149 of SEQ ID NO: 125,
amino acids 25-147 of SEQ ID NO: 127, amino acids 25-147 of SEQ ID NO: 129,
amino acids 25-145 of SEQ ID NO: 131, amino acids 25-146 of SEQ ID NO: 133,
amino acids 25-152 of SEQ ID NO: 135, amino acids 25-146 of SEQ ID NO: 137,
amino acids 25-149 of SEQ ID NO: 139, amino acids 25-149 of SEQ ID NO: 141,
amino acids 25-145 of SEQ ID NO: 143, amino acids 25-142 of SEQ ID NO: 145,
amino acids 25-147 of SEQ ID NO: 147, amino acids 25-141 of SEQ ID NO: 149,
amino acids 25-140 of SEQ ID NO: 151, amino acids 25-145 of SEQ ID NO: 153,
amino acids 25-153 of SEQ ID NO: 155, amino acids 25-146 of SEQ ID NO: 157,
amino acids 25-149 of SEQ ID NO: 159, amino acids 25-141 of SEQ ID NO: 161,
amino acids 25-156 of SEQ ID NO: 163, amino acids 25-141 of SEQ ID NO: 165,
amino acids 25-140 of SEQ ID NO: 167, amino acids 25-140 of SEQ ID NO: 169,
amino acids 25-141 of SEQ ID NO: 171, amino acids 25-140 of SEQ ID NO: 173,
amino acids 25-144 of SEQ ID NO: 175, amino acids 25-142 of SEQ ID NO: 177,
amino acids 25-145 of SEQ ID NO: 179, amino acids 25-145 of SEQ ID NO: 181,
amino acids 25-143 of SEQ ID NO: 183, amino acids 25-147 of SEQ ID NO: 185,
amino acids 25-143 of SEQ ID NO: 187, amino acids 25-145 of SEQ ID NO: 189,
amino acids 25-144 of SEQ ID NO: 191, amino acids 25-143 of SEQ ID NO: 193,
amino acids 25-146 of SEQ ID NO: 195, amino acids 25-141 of SEQ ID NO: 197,
amino acids 25-146 of SEQ ID NO: 199, amino acids 25-142 of SEQ ID NO: 201,
amino acids 25-139 of SEQ ID NO: 203, amino acids 25-144 of SEQ ID NO: 205,
amino acids 25-146 of SEQ ID NO: 207, amino acids 25-142 of SEQ ID NO: 209,
amino acids 25-151 of SEQ ID NO: 211, amino acids 25-141 of SEQ ID NO: 213,
amino acids 25-140 of SEQ ID NO: 215, amino acids 25-146 of SEQ ID NO: 217,
amino acids 25-142 of SEQ ID NO: 219, amino acids 25-143 of SEQ ID NO: 221,
amino acids 25-150 of SEQ ID NO: 223, amino acids 25-144 of SEQ ID NO: 225,
amino acids 25-145 of SEQ ID NO: 227, amino acids 25-149 of SEQ ID NO: 229,
amino acids 25-147 of SEQ ID NO: 231, amino acids 25-140 of SEQ ID NO: 233,
amino acids 25-141 of SEQ ID NO: 235, amino acids 25-140 of SEQ ID NO: 237, and
amino acids 25-150 of SEQ ID NO: 239; and
(ii) a light chain variable domain comprising CDRs as set forth in a light chain variable region amino acid sequence selected from the group consisting of:
amino acids 21-132 of SEQ ID NO: 241, amino acids 21-132 of SEQ ID NO: 243,
amino acids 21-128 of SEQ ID NO: 245, amino acids 21-127 of SEQ ID NO: 247,
amino acids 21-127 of SEQ ID NO: 249, amino acids 21-127 of SEQ ID NO: 251,
amino acids 21-131 of SEQ ID NO: 253, amino acids 21-132 of SEQ ID NO: 255,
amino acids 21-127 of SEQ ID NO: 257, amino acids 21-132 of SEQ ID NO: 259,
amino acids 21-127 of SEQ ID NO: 261, amino acids 21-127 of SEQ ID NO: 263,
amino acids 21-132 of SEQ ID NO: 265, amino acids 21-132 of SEQ ID NO: 267,
amino acids 21-127 of SEQ ID NO: 269, amino acids 21-127 of SEQ ID NO: 271,
amino acids 21-127 of SEQ ID NO: 273, amino acids 21-127 of SEQ ID NO: 275,
amino acids 21-127 of SEQ ID NO: 277, amino acids 21-127 of SEQ ID NO: 279,
amino acids 21-127 of SEQ ID NO: 281, amino acids 21-127 of SEQ ID NO: 283,
amino acids 21-127 of SEQ ID NO: 285, amino acids 21-132 of SEQ ID NO: 287,
amino acids 21-127 of SEQ ID NO: 289, amino acids 21-133 of SEQ ID NO: 291,
amino acids 21-127 of SEQ ID NO: 293, amino acids 21-132 of SEQ ID NO: 295,
amino acids 21-127 of SEQ ID NO: 297, amino acids 21-132 of SEQ ID NO: 299,
amino acids 21-127 of SEQ ID NO: 301, amino acids 21-127 of SEQ ID NO: 303,
amino acids 21-132 of SEQ ID NO: 305, amino acids 21-127 of SEQ ID NO: 307,
amino acids 21-127 of SEQ ID NO: 309, amino acids 21-127 of SEQ ID NO: 311,
amino acids 21-127 of SEQ ID NO: 313, amino acids 21-128 of SEQ ID NO: 315,
amino acids 21-132 of SEQ ID NO: 317, amino acids 21-127 of SEQ ID NO: 319,
amino acids 21-133 of SEQ ID NO: 321, amino acids 21-127 of SEQ ID NO: 323,
amino acids 21-127 of SEQ ID NO: 325, amino acids 21-127 of SEQ ID NO: 327,
amino acids 21-127 of SEQ ID NO: 329, amino acids 21-127 of SEQ ID NO: 331,
amino acids 21-127 of SEQ ID NO: 333, amino acids 21-127 of SEQ ID NO: 335,
amino acids 21-127 of SEQ ID NO: 337, amino acids 21-127 of SEQ ID NO: 339,
amino acids 21-128 of SEQ ID NO: 341, amino acids 21-131 of SEQ ID NO: 343,
amino acids 21-127 of SEQ ID NO: 345, amino acids 21-131 of SEQ ID NO: 347,
amino acids 21-132 of SEQ ID NO: 349, amino acids 21-127 of SEQ ID NO: 351,
amino acids 21-127 of SEQ ID NO: 353, amino acids 21-127 of SEQ ID NO: 355,
amino acids 21-127 of SEQ ID NO: 357, amino acids 21-127 of SEQ ID NO: 359,
amino acids 21-132 of SEQ ID NO: 361, amino acids 21-133 of SEQ ID NO: 363,
amino acids 21-132 of SEQ ID NO: 365, amino acids 21-126 of SEQ ID NO: 367,
amino acids 21-127 of SEQ ID NO: 369, amino acids 21-132 of SEQ ID NO: 371,
amino acids 21-127 of SEQ ID NO: 373, amino acids 21-132 of SEQ ID NO: 375,
amino acids 21-132 of SEQ ID NO: 377, amino acids 21-128 of SEQ ID NO: 379,
amino acids 21-127 of SEQ ID NO: 381, amino acids 21-127 of SEQ ID NO: 383,
amino acids 21-127 of SEQ ID NO: 385, amino acids 21-127 of SEQ ID NO: 387,
amino acids 21-127 of SEQ ID NO: 389, amino acids 21-127 of SEQ ID NO: 391,
amino acids 21-133 of SEQ ID NO: 393, amino acids 21-127 of SEQ ID NO: 395,
amino acids 21-127 of SEQ ID NO: 397, amino acids 21-132 of SEQ ID NO: 399,
amino acids 21-127 of SEQ ID NO: 401, amino acids 21-127 of SEQ ID NO: 403,
amino acids 21-127 of SEQ ID NO: 405, amino acids 21-132 of SEQ ID NO: 407,
amino acids 21-127 of SEQ ID NO: 409, amino acids 21-127 of SEQ ID NO: 411,
amino acids 21-127 of SEQ ID NO: 413, amino acids 21-127 of SEQ ID NO: 415,
amino acids 21-127 of SEQ ID NO: 417, amino acids 21-132 of SEQ ID NO: 419,
amino acids 21-127 of SEQ ID NO: 421, amino acids 21-133 of SEQ ID NO: 423,
amino acids 21-132 of SEQ ID NO: 425, amino acids 21-128 of SEQ ID NO: 427,
amino acids 21-132 of SEQ ID NO: 429, amino acids 21-132 of SEQ ID NO: 431,
amino acids 21-127 of SEQ ID NO: 433, amino acids 21-127 of SEQ ID NO: 435,
amino acids 21-127 of SEQ ID NO: 437, amino acids 21-127 of SEQ ID NO: 439,
amino acids 21-126 of SEQ ID NO: 441, amino acids 21-132 of SEQ ID NO: 443,
amino acids 21-127 of SEQ ID NO: 445, amino acids 21-127 of SEQ ID NO: 447,
amino acids 21-127 of SEQ ID NO: 449, amino acids 21-128 of SEQ ID NO: 451,
amino acids 21-127 of SEQ ID NO: 453, amino acids 21-127 of SEQ ID NO: 455 and
amino acids 21-133 of SEQ ID NO: 457.

7. A recombinant antibody or an antigen-binding fragment thereof that specifically binds ST2, wherein the antibody, or antigen-binding fragment thereof, comprises six complementarity determining regions (CDRs): CDRH1, CDRH2, CDRH3, CDRL1, CDRL2, and CDRL3,
wherein CDRH1 comprises an amino acid sequence that has at least 85% sequence identity to a CDRH1 amino acid sequence selected from the group consisting of:
SEQ ID NO: 458, SEQ ID NO: 464, SEQ ID NO: 470, SEQ ID NO: 476, SEQ ID NO: 482,
SEQ ID NO: 488, SEQ ID NO: 494, SEQ ID NO: 500, SEQ ID NO: 506, SEQ ID NO: 512,
SEQ ID NO: 518, SEQ ID NO: 524, SEQ ID NO: 530, SEQ ID NO: 536, SEQ ID NO: 542,
SEQ ID NO: 548, SEQ ID NO: 554, SEQ ID NO: 560, SEQ ID NO: 566, SEQ ID NO: 572,
SEQ ID NO: 578, SEQ ID NO: 584, SEQ ID NO: 590, SEQ ID NO: 596, SEQ ID NO: 602,
SEQ ID NO: 608, SEQ ID NO: 614, SEQ ID NO: 620, SEQ ID NO: 626, SEQ ID NO: 632,
SEQ ID NO: 638, SEQ ID NO: 644, SEQ ID NO: 650, SEQ ID NO: 656, SEQ ID NO: 662,
SEQ ID NO: 668, SEQ ID NO: 674, SEQ ID NO: 680, SEQ ID NO: 686, SEQ ID NO: 692,
SEQ ID NO: 698, SEQ ID NO: 704, SEQ ID NO: 710, SEQ ID NO: 716, SEQ ID NO: 722,
SEQ ID NO: 728, SEQ ID NO: 734, SEQ ID NO: 740, SEQ ID NO: 746, SEQ ID NO: 752,
SEQ ID NO: 758, SEQ ID NO: 764, SEQ ID NO: 770, SEQ ID NO: 776, SEQ ID NO: 782,
SEQ ID NO: 788, SEQ ID NO: 794, SEQ ID NO: 800, SEQ ID NO: 806, SEQ ID NO: 812,
SEQ ID NO: 818, SEQ ID NO: 824, SEQ ID NO: 830, SEQ ID NO: 836, SEQ ID NO: 842,
SEQ ID NO: 848, SEQ ID NO: 854, SEQ ID NO: 860, SEQ ID NO: 866, SEQ ID NO: 872,
SEQ ID NO: 878, SEQ ID NO: 884, SEQ ID NO: 890, SEQ ID NO: 896, SEQ ID NO: 902,
SEQ ID NO: 908, SEQ ID NO: 914, SEQ ID NO: 920, SEQ ID NO: 926, SEQ ID NO: 932,
SEQ ID NO: 938, SEQ ID NO: 944, SEQ ID NO: 950, SEQ ID NO: 956, SEQ ID NO: 962,
SEQ ID NO: 968, SEQ ID NO: 974, SEQ ID NO: 980, SEQ ID NO: 986, SEQ ID NO: 992,
SEQ ID NO: 998, SEQ ID NO: 1004, SEQ ID NO: 1010, SEQ ID NO: 1016, SEQ ID NO: 1022,
SEQ ID NO: 1028, SEQ ID NO: 1034, SEQ ID NO: 1040, SEQ ID NO: 1046, SEQ ID NO: 1052,
SEQ ID NO: 1058, SEQ ID NO: 1064, SEQ ID NO: 1070, SEQ ID NO: 1076, SEQ ID NO: 1082,
SEQ ID NO: 1088, SEQ ID NO: 1094, SEQ ID NO: 1100 and SEQ ID NO: 1106;
wherein CDRH2 comprises an amino acid sequence that has at least 85% sequence identity to a CDRH2 amino acid sequence selected from the group consisting of:
SEQ ID NO: 459, SEQ ID NO: 465, SEQ ID NO: 471, SEQ ID NO: 477, SEQ ID NO: 483,
SEQ ID NO: 489, SEQ ID NO: 495, SEQ ID NO: 501, SEQ ID NO: 507, SEQ ID NO: 513,
SEQ ID NO: 519, SEQ ID NO: 525, SEQ ID NO: 531, SEQ ID NO: 537, SEQ ID NO: 543,
SEQ ID NO: 549, SEQ ID NO: 555, SEQ ID NO: 561, SEQ ID NO: 567, SEQ ID NO: 573,
SEQ ID NO: 579, SEQ ID NO: 585, SEQ ID NO: 591, SEQ ID NO: 597, SEQ ID NO: 603,
SEQ ID NO: 609, SEQ ID NO: 615, SEQ ID NO: 621, SEQ ID NO: 627, SEQ ID NO: 633,
SEQ ID NO: 639, SEQ ID NO: 645, SEQ ID NO: 651, SEQ ID NO: 657, SEQ ID NO: 663,
SEQ ID NO: 669, SEQ ID NO: 675, SEQ ID NO: 681, SEQ ID NO: 687, SEQ ID NO: 693,
SEQ ID NO: 699, SEQ ID NO: 705, SEQ ID NO: 711, SEQ ID NO: 717, SEQ ID NO: 723,
SEQ ID NO: 729, SEQ ID NO: 735, SEQ ID NO: 741, SEQ ID NO: 747, SEQ ID NO: 753,
SEQ ID NO: 759, SEQ ID NO: 765, SEQ ID NO: 771, SEQ ID NO: 777, SEQ ID NO: 783,
SEQ ID NO: 789, SEQ ID NO: 795, SEQ ID NO: 801, SEQ ID NO: 807, SEQ ID NO: 813,
SEQ ID NO: 819, SEQ ID NO: 825, SEQ ID NO: 831, SEQ ID NO: 837, SEQ ID NO: 843,
SEQ ID NO: 849, SEQ ID NO: 855, SEQ ID NO: 861, SEQ ID NO: 867, SEQ ID NO: 873,
SEQ ID NO: 879, SEQ ID NO: 885, SEQ ID NO: 891, SEQ ID NO: 897, SEQ ID NO: 903,
SEQ ID NO: 909, SEQ ID NO: 915, SEQ ID NO: 921, SEQ ID NO: 927, SEQ ID NO: 933,
SEQ ID NO: 939, SEQ ID NO: 945, SEQ ID NO: 951, SEQ ID NO: 957, SEQ ID NO: 963,
SEQ ID NO: 969, SEQ ID NO: 975, SEQ ID NO: 981, SEQ ID NO: 987, SEQ ID NO: 993,
SEQ ID NO: 999, SEQ ID NO: 1005, SEQ ID NO: 1011, SEQ ID NO: 1017, SEQ ID NO: 1023,
SEQ ID NO: 1029, SEQ ID NO: 1035, SEQ ID NO: 1041, SEQ ID NO: 1047, SEQ ID NO: 1053,
SEQ ID NO: 1059, SEQ ID NO: 1065, SEQ ID NO: 1071, SEQ ID NO: 1077, SEQ ID NO: 1083,
SEQ ID NO: 1089, SEQ ID NO: 1095, SEQ ID NO: 1101 and SEQ ID NO: 1107,
wherein CDRH3 comprises an amino acid sequence that has at least 85% sequence identity to a CDRH3 amino acid sequence selected from the group consisting of:
SEQ ID NO: 460, SEQ ID NO: 466, SEQ ID NO: 472, SEQ ID NO: 478, SEQ ID NO: 484,
SEQ ID NO: 490, SEQ ID NO: 496, SEQ ID NO: 502, SEQ ID NO: 508, SEQ ID NO: 514,
SEQ ID NO: 520, SEQ ID NO: 526, SEQ ID NO: 532, SEQ ID NO: 538, SEQ ID NO: 544,
SEQ ID NO: 550, SEQ ID NO: 556, SEQ ID NO: 562, SEQ ID NO: 568, SEQ ID NO: 574,
SEQ ID NO: 580, SEQ ID NO: 586, SEQ ID NO: 592, SEQ ID NO: 598, SEQ ID NO: 604,
SEQ ID NO: 610, SEQ ID NO: 616, SEQ ID NO: 622, SEQ ID NO: 628, SEQ ID NO: 634,
SEQ ID NO: 640, SEQ ID NO: 646, SEQ ID NO: 652, SEQ ID NO: 658, SEQ ID NO: 664,
SEQ ID NO: 670, SEQ ID NO: 676, SEQ ID NO: 682, SEQ ID NO: 688, SEQ ID NO: 694,
SEQ ID NO: 700, SEQ ID NO: 706, SEQ ID NO: 712, SEQ ID NO: 718, SEQ ID NO: 724,
SEQ ID NO: 730, SEQ ID NO: 736, SEQ ID NO: 742, SEQ ID NO: 748, SEQ ID NO: 754,
SEQ ID NO: 760, SEQ ID NO: 766, SEQ ID NO: 772, SEQ ID NO: 778, SEQ ID NO: 784,
SEQ ID NO: 790, SEQ ID NO: 796, SEQ ID NO: 802, SEQ ID NO: 808, SEQ ID NO: 814,
SEQ ID NO: 820, SEQ ID NO: 826, SEQ ID NO: 832, SEQ ID NO: 838, SEQ ID NO: 844,
SEQ ID NO: 850, SEQ ID NO: 856, SEQ ID NO: 862, SEQ ID NO: 868, SEQ ID NO: 874,
SEQ ID NO: 880, SEQ ID NO: 886, SEQ ID NO: 892, SEQ ID NO: 898, SEQ ID NO: 904,
SEQ ID NO: 910, SEQ ID NO: 916, SEQ ID NO: 922, SEQ ID NO: 928, SEQ ID NO: 934,
SEQ ID NO: 940, SEQ ID NO: 946, SEQ ID NO: 952, SEQ ID NO: 958, SEQ ID NO: 964,
SEQ ID NO: 970, SEQ ID NO: 976, SEQ ID NO: 982, SEQ ID NO: 988, SEQ ID NO: 994,
SEQ ID NO: 1000, SEQ ID NO: 1006, SEQ ID NO: 1012, SEQ ID NO: 1018, SEQ ID NO: 1024,
SEQ ID NO: 1030, SEQ ID NO: 1036, SEQ ID NO: 1042, SEQ ID NO: 1048, SEQ ID NO: 1054,
SEQ ID NO: 1060, SEQ ID NO: 1066, SEQ ID NO: 1072, SEQ ID NO: 1078, SEQ ID NO: 1084,
SEQ ID NO: 1090, SEQ ID NO: 1096, SEQ ID NO: 1102 and SEQ ID NO: 1108,
wherein CDRL1 comprises an amino acid sequence that has at least 85% sequence identity to a CDRL1 amino acid sequence selected from the group consisting of:
SEQ ID NO: 461, SEQ ID NO: 467, SEQ ID NO: 473, SEQ ID NO: 479, SEQ ID NO: 485,
SEQ ID NO: 491, SEQ ID NO: 497, SEQ ID NO: 503, SEQ ID NO: 509, SEQ ID NO: 515,
SEQ ID NO: 521, SEQ ID NO: 527, SEQ ID NO: 533, SEQ ID NO: 539, SEQ ID NO: 545,
SEQ ID NO: 551, SEQ ID NO: 557, SEQ ID NO: 563, SEQ ID NO: 569, SEQ ID NO: 575,
SEQ ID NO: 581, SEQ ID NO: 587, SEQ ID NO: 593, SEQ ID NO: 599, SEQ ID NO: 605,
SEQ ID NO: 611, SEQ ID NO: 617, SEQ ID NO: 623, SEQ ID NO: 629, SEQ ID NO: 635,
SEQ ID NO: 641, SEQ ID NO: 647, SEQ ID NO: 653, SEQ ID NO: 659, SEQ ID NO: 665,
SEQ ID NO: 671, SEQ ID NO: 677, SEQ ID NO: 683, SEQ ID NO: 689, SEQ ID NO: 695,
SEQ ID NO: 701, SEQ ID NO: 707, SEQ ID NO: 713, SEQ ID NO: 719, SEQ ID NO: 725,
SEQ ID NO: 731, SEQ ID NO: 737, SEQ ID NO: 743, SEQ ID NO: 749, SEQ ID NO: 755,
SEQ ID NO: 761, SEQ ID NO: 767, SEQ ID NO: 773, SEQ ID NO: 779, SEQ ID NO: 785,
SEQ ID NO: 791, SEQ ID NO: 797, SEQ ID NO: 803, SEQ ID NO: 809, SEQ ID NO: 815,
SEQ ID NO: 821, SEQ ID NO: 827, SEQ ID NO: 833, SEQ ID NO: 839, SEQ ID NO: 845,
SEQ ID NO: 851, SEQ ID NO: 857, SEQ ID NO: 863, SEQ ID NO: 869, SEQ ID NO: 875,
SEQ ID NO: 881, SEQ ID NO: 887, SEQ ID NO: 893, SEQ ID NO: 899, SEQ ID NO: 905,
SEQ ID NO: 911, SEQ ID NO: 917, SEQ ID NO: 923, SEQ ID NO: 929, SEQ ID NO: 935,
SEQ ID NO: 941, SEQ ID NO: 947, SEQ ID NO: 953, SEQ ID NO: 959, SEQ ID NO: 965,
SEQ ID NO: 971, SEQ ID NO: 977, SEQ ID NO: 983, SEQ ID NO: 989, SEQ ID NO: 995,
SEQ ID NO: 1001, SEQ ID NO: 1007, SEQ ID NO: 1013, SEQ ID NO: 1019, SEQ ID NO: 1025,
SEQ ID NO: 1031, SEQ ID NO: 1037, SEQ ID NO: 1043, SEQ ID NO: 1049, SEQ ID NO: 1055,
SEQ ID NO: 1061, SEQ ID NO: 1067, SEQ ID NO: 1073, SEQ ID NO: 1079, SEQ ID NO: 1085,
SEQ ID NO: 1091, SEQ ID NO: 1097, SEQ ID NO: 1103 and SEQ ID NO: 1109,
wherein CDRL2 comprises an amino acid sequence that that has at least 85% sequence identity to a CDRL2 sequence selected from the group consisting of:
SEQ ID NO: 462, SEQ ID NO: 468, SEQ ID NO: 474, SEQ ID NO: 480, SEQ ID NO: 486,
SEQ ID NO: 492, SEQ ID NO: 498, SEQ ID NO: 504, SEQ ID NO: 510, SEQ ID NO: 516,
SEQ ID NO: 522, SEQ ID NO: 528, SEQ ID NO: 534, SEQ ID NO: 540, SEQ ID NO: 546,
SEQ ID NO: 552, SEQ ID NO: 558, SEQ ID NO: 564, SEQ ID NO: 570, SEQ ID NO: 576,
SEQ ID NO: 582, SEQ ID NO: 588, SEQ ID NO: 594, SEQ ID NO: 600, SEQ ID NO: 606,
SEQ ID NO: 612, SEQ ID NO: 618, SEQ ID NO: 624, SEQ ID NO: 630, SEQ ID NO: 636,
SEQ ID NO: 642, SEQ ID NO: 648, SEQ ID NO: 654, SEQ ID NO: 660, SEQ ID NO: 666,
SEQ ID NO: 672, SEQ ID NO: 678, SEQ ID NO: 684, SEQ ID NO: 690, SEQ ID NO: 696,
SEQ ID NO: 702, SEQ ID NO: 708, SEQ ID NO: 714, SEQ ID NO: 720, SEQ ID NO: 726,
SEQ ID NO: 732, SEQ ID NO: 738, SEQ ID NO: 744, SEQ ID NO: 750, SEQ ID NO: 756,
SEQ ID NO: 762, SEQ ID NO: 768, SEQ ID NO: 774, SEQ ID NO: 780, SEQ ID NO: 786,
SEQ ID NO: 792, SEQ ID NO: 798, SEQ ID NO: 804, SEQ ID NO: 810, SEQ ID NO: 816,
SEQ ID NO: 822, SEQ ID NO: 828, SEQ ID NO: 834, SEQ ID NO: 840, SEQ ID NO: 846,
SEQ ID NO: 852, SEQ ID NO: 858, SEQ ID NO: 864, SEQ ID NO: 870, SEQ ID NO: 876,
SEQ ID NO: 882, SEQ ID NO: 888, SEQ ID NO: 894, SEQ ID NO: 900, SEQ ID NO: 906,
SEQ ID NO: 912, SEQ ID NO: 918, SEQ ID NO: 924, SEQ ID NO: 930, SEQ ID NO: 936,
SEQ ID NO: 942, SEQ ID NO: 948, SEQ ID NO: 954, SEQ ID NO: 960, SEQ ID NO: 966,
SEQ ID NO: 972, SEQ ID NO: 978, SEQ ID NO: 984, SEQ ID NO: 990, SEQ ID NO: 996,
SEQ ID NO: 1002, SEQ ID NO: 1008, SEQ ID NO: 1014, SEQ ID NO: 1020, SEQ ID NO: 1026, SEQ ID NO: 1032, SEQ ID NO: 1038, SEQ ID NO: 1044, SEQ ID NO: 1050, SEQ ID NO: 1056, SEQ ID NO: 1062, SEQ ID NO: 1068, SEQ ID NO: 1074, SEQ ID NO: 1080, SEQ ID NO: 1086, SEQ ID NO: 1092, SEQ ID NO: 1098, SEQ ID NO: 1104 and SEQ ID NO: 1110,
wherein CDRL3 comprises an amino acid sequence that has at least 85% sequence identity to a CDRL3 sequence selected from the group consisting of:
SEQ ID NO: 463, SEQ ID NO: 469, SEQ ID NO: 475, SEQ ID NO: 481, SEQ ID NO: 487,
SEQ ID NO: 493, SEQ ID NO: 499, SEQ ID NO: 505, SEQ ID NO: 511, SEQ ID NO: 517,
SEQ ID NO: 523, SEQ ID NO: 529, SEQ ID NO: 535, SEQ ID NO: 541, SEQ ID NO: 547,
SEQ ID NO: 553, SEQ ID NO: 559, SEQ ID NO: 565, SEQ ID NO: 571, SEQ ID NO: 577,
SEQ ID NO: 583, SEQ ID NO: 589, SEQ ID NO: 595, SEQ ID NO: 601, SEQ ID NO: 607,
SEQ ID NO: 613, SEQ ID NO: 619, SEQ ID NO: 625, SEQ ID NO: 631, SEQ ID NO: 637,
SEQ ID NO: 643, SEQ ID NO: 649, SEQ ID NO: 655, SEQ ID NO: 661, SEQ ID NO: 667,
SEQ ID NO: 673, SEQ ID NO: 679, SEQ ID NO: 685, SEQ ID NO: 691, SEQ ID NO: 697,
SEQ ID NO: 703, SEQ ID NO: 709, SEQ ID NO: 715, SEQ ID NO: 721, SEQ ID NO: 727,
SEQ ID NO: 733, SEQ ID NO: 739, SEQ ID NO: 745, SEQ ID NO: 751, SEQ ID NO: 757,
SEQ ID NO: 763, SEQ ID NO: 769, SEQ ID NO: 775, SEQ ID NO: 781, SEQ ID NO: 787,
SEQ ID NO: 793, SEQ ID NO: 799, SEQ ID NO: 805, SEQ ID NO: 811, SEQ ID NO: 817,
SEQ ID NO: 823, SEQ ID NO: 829, SEQ ID NO: 835, SEQ ID NO: 841, SEQ ID NO: 847,
SEQ ID NO: 853, SEQ ID NO: 859, SEQ ID NO: 865, SEQ ID NO: 871, SEQ ID NO: 877,
SEQ ID NO: 883, SEQ ID NO: 889, SEQ ID NO: 895, SEQ ID NO: 901, SEQ ID NO: 907,
SEQ ID NO: 913, SEQ ID NO: 919, SEQ ID NO: 925, SEQ ID NO: 931, SEQ ID NO: 937,
SEQ ID NO: 943, SEQ ID NO: 949, SEQ ID NO: 955, SEQ ID NO: 961, SEQ ID NO: 967,
SEQ ID NO: 973, SEQ ID NO: 979, SEQ ID NO: 985, SEQ ID NO: 991, SEQ ID NO: 997,
SEQ ID NO: 1003, SEQ ID NO: 1009, SEQ ID NO: 1015, SEQ ID NO: 1021, SEQ ID NO: 1027,
SEQ ID NO: 1033, SEQ ID NO: 1039, SEQ ID NO: 1045, SEQ ID NO: 1051, SEQ ID NO: 1057,
SEQ ID NO: 1063, SEQ ID NO: 1069, SEQ ID NO: 1075, SEQ ID NO: 1081, SEQ ID NO: 1087,
SEQ ID NO: 1093, SEQ ID NO: 1099, SEQ ID NO: 1105 and SEQ ID NO: 1111.

8. The recombinant antibody, or the antigen-binding fragment thereof of claim 1, which is a fully human antibody.

9. The antigen-binding fragment of claim 1, wherein the fragment is selected from the group consisting of a Fab fragment, a F(ab′)2 fragment, a Fd fragment, a Fv fragment, a dAb fragment, a single chain Fv (scFv), a dimerized variable region (V region) fragment (diabody), and a disulfide-stabilized V region fragment (dsFv).

10. A fusion protein comprising:
a) a human IL-2 protein domain;
b) an immunoglobulin Fc protein domain; and
c) an ST2-binding domain comprising the antibody specific for ST2, or the antigen-binding fragment thereof of claim 1.

11. The fusion protein of claim 10, further comprising at least one peptide linker domain.

12. The fusion protein of claim 10, wherein the human IL-2 protein domain comprises human IL-2 with a substitution selected from the group consisting of: T3A, N88R, N88G, D20H, C125S, Q126L, and Q126F.

13. The fusion protein of claim 10, wherein the immunoglobulin Fc protein domain comprises an amino acid sequence selected from the group consisting of the human IgG1 Fc variant of SEQ ID NO: 4, SEQ ID NO: 5, SEQ ID NO: 7, SEQ ID NO: 8 or SEQ ID NO: 9.

14. The fusion protein of claim 10, wherein the peptide linker domain comprises the amino acid sequence of SEQ ID NO: 6.

15. The fusion protein of claim 10, comprising a first peptide linker domain and a second peptide linker domain.

16. The fusion protein of claim 15, wherein each domain has an amino-terminus (N-terminus) and a carboxy terminus (C-terminus); and wherein the fusion protein is configured so that
a) the C-terminus of the human IL-2 protein domain is fused through a peptide bond to the N-terminus of the first peptide linker domain;
b) the N-terminus of the IgG Fc protein domain is fused through a peptide bond to the C-terminus of the first peptide linker domain;
c) the N-terminus of the second peptide linker domain is fused through a peptide bond to the C-terminus of the IgG Fc protein domain; and
d) the N-terminus of the ST2-binding domain is fused through a peptide bond to the C-terminus of the second peptide linker domain.

17. A nucleic acid encoding the fusion protein of claim 10.

18. A dimeric protein comprising the fusion protein of claim 10.

19. A dimeric protein comprising a first fusion protein and a second fusion protein, wherein:
a. each fusion protein comprises an immunoglobulin (IgG) Fc protein domain and at least one additional protein domain selected from the group consisting of
i. a human IL-2 protein domain; and
ii. an ST2-binding domain comprising the antibody or antigen-binding fragment of claim 1; and
b. the dimeric protein comprises at least one of the human IL-2 protein domain and at least one of the ST2-binding domain.

20. The dimeric protein of claim 19, wherein
a. the first fusion protein comprises the human IL-2 protein domain, a first immunoglobulin Fc protein domain, and a first peptide linker; and
b. the second fusion protein comprises the ST2-binding domain, a second immunoglobulin Fc protein domain, and a second peptide linker domain.

21. The dimeric protein of claim 19, wherein
a. each domain has an amino-terminus (N-terminus) and a carboxy terminus (C-terminus);
b. the first fusion protein is configured so that
i. the C-terminus of the human IL-2 protein domain is fused through a peptide bond to the N-terminus of the first peptide linker domain; and
ii. the N-terminus of the first IgG Fc protein domain is fused through a peptide bond to the C-terminus of the first peptide linker domain; and
c. the second fusion protein is configured so that
i. the C-terminus of the second IgG Fc protein domain is fused through a peptide bond to the N-terminus of the second peptide linker domain; and
ii. the N-terminus of the ST2-binding domain is fused through a peptide bond to the C-terminus of the second peptide linker domain.

22. The dimeric protein of claim 19, wherein at least one of the fusion proteins further comprises at least one peptide linker domain.

23. The dimeric protein of claim 19, wherein the peptide linker domain comprises the amino acid sequence of SEQ ID NO: 6.

24. The dimeric protein of claim 19, wherein the human IL-2 protein domain comprises human IL-2 with a substitution selected from the group consisting of: T3A, N88R, N88G, D20H, C125S, Q126L, and Q126F, relative to the amino acid sequence of SEQ ID NO: 2.

25. The dimeric protein of claim 19, wherein the immunoglobulin Fc protein domain comprises an amino acid sequence selected from the group consisting of the human IgG1 Fc variant of SEQ ID NO: 4, SEQ ID NO: 5, SEQ ID NO: 7, SEQ ID NO: 8 or SEQ ID NO: 9.

26. A pharmaceutical composition comprising the dimeric protein of claim 19.

27. A method for treating a condition, the method comprising administering to a subject in need thereof a therapeutically-effective amount of the pharmaceutical composition of claim 26.

28. The method of claim 27, wherein the condition is selected from the group consisting of an inflammatory myopathy, muscular dystrophy, polymyositis, dermatomyositis, an inflammatory condition of adipose tissue, an inflammatory condition of the colon, an inflammatory condition of the lung, Graft-vs-Host Disease, Pemphigus Vulgaris, Systemic Lupus Erythematosus, Scleroderma, Ulcerative Colitis, Crohn's Disease, Psoriasis, Type 1 Diabetes, Multiple Sclerosis, Amyotrophic Lateral Sclerosis, Alopecia Areata, Uveitis, Neuromyelitis Optica, and Duchenne Muscular Dystrophy.

29. The method of claim 27, wherein the administration is subcutaneous.

30. A method of selectively activating an ST2⁺ regulatory T cell relative to an ST2⁻ regulatory T cell in a subject, the method comprising administering to the subject a therapeutically effective amount of the pharmaceutical composition of claim 26.

The application's sequence listing, which the Patent Office published only in electronic form, follows.

SEQUENCE LISTING (1111 sequences)

SEQ ID NO: 1 - protein, 133 aa, Artificial Sequence
  IL2 N88R C125S mutant
APTSSSTKKTQLQLEHLLLDLQMILNGINNYKNPKLTRMLTFKFYMPKKATELKHLQCLEEELKPLEEVLNLAQSKNFHLRPRDLISRINVIVLELKGSETTFMCEYADETATIVEFLNRWITFSQSIISTLT

SEQ ID NO: 2 - protein, 133 aa, Homo sapiens [sequence omitted]

SEQ ID NO: 3 - protein, 133 aa, Artificial Sequence
  IL2 T3A, N88R, C125S mutant
APASSSTKKTQLQLEHLLLDLQMILNGINNYKNPKLTRMLTFKFYMPKKATELKHLQCLEEELKPLEEVLNLAQSKNFHLRPRDLISRINVIVLELKGSETTFMCEYADETATIVEFLNRWITFSQSIISTLT

SEQ ID NO: 4 - protein, 226 aa, Artificial Sequence
  IgG1 Fc N297A, T350V, L351Y, F405A, Y407V mutant
DKTHTCPPCPAPELLGGPSVFLFPPKPKDTLMISRTPEVTCVVVDVSHEDPEVKFNWYVDGVEVHNAKTKPREEQYASTYRVVSVLTVLHQDWLNGKEYKCKVSNKALPAPIEKTISKAKGQPREPQVYVYPPSRDELTKNQVSLTCLVKGFYPSDIAVEWESNGQPENNYKTTPPVLDSDGSFALVSKLTVDKSRWQQGNVFSCSVMHEALHNHYTQKSLSLSPG

SEQ ID NO: 5 - protein, 226 aa, Artificial Sequence
  IgG1 Fc N297A, T350V, T366L, K392L, T394W mutant
DKTHTCPPCPAPELLGGPSVFLFPPKPKDTLMISRTPEVTCVVVDVSHEDPEVKFNWYVDGVEVHNAKTKPREEQYASTYRVVSVLTVLHQDWLNGKEYKCKVSNKALPAPIEKTISKAKGQPREPQVYVLPPSRDELTKNQVSLLCLVKGFYPSDIAVEWESNGQPENNYLTWPPVLDSDGSFFLYSKLTVDKSRWQQGNVFSCSVMHEALHNHYTQKSLSLSPG

SEQ ID NO: 6 - protein, 15 aa, Artificial Sequence
  Peptide linker
GGGGSGGGGSGGGGS

SEQ ID NO: 7 - protein, 226 aa, Artificial Sequence
  IgG1 Fc 297A mutant
DKTHTCPPCPAPELLGGPSVFLFPPKPKDTLMISRTPEVTCVVVDVSHEDPEVKFNWYVDGVEVHNAKTKPREEQYASTYRVVSVLTVLHQDWLNGKEYKCKVSNKALPAPIEKTISKAKGQPREPQVYTLPPSRDELTKNQVSLTCLVKGFYPSDIAVEWESNGQPENNYKTTPPVLDSDGSFFLYSKLTVDKSRWQQGNVFSCSVMHEALHNHYTQKSLSLSPG

SEQ ID NO: 8 - protein, 226 aa, Artificial Sequence
  IgG1 Fc T366Y mutant
DKTHTCPPCPAPELLGGPSVFLFPPKPKDTLMISRTPEVTCVVVDVSHEDPEVKFNWYVDGVEVHNAKTKPREEQYASTYRVVSVLTVLHQDWLNGKEYKCKVSNKALPAPIEKTISKAKGQPREPQVYTLPPSRDELTKNQVSLYCLVKGFYPSDIAVEWESNGQPENNYKTTPPVLDSDGSFFLYSKLTVDKSRWQQGNVFSCSVMHEALHNHYTQKSLSLSPG

SEQ ID NO: 9 - protein, 226 aa, Artificial Sequence
  IgG1 Fc Y407T mutant
DKTHTCPPCPAPELLGGPSVFLFPPKPKDTLMISRTPEVTCVVVDVSHEDPEVKFNWYVDGVEVHNAKTKPREEQYASTYRVVSVLTVLHQDWLNGKEYKCKVSNKALPAPIEKTISKAKGQPREPQVYTLPPSRDELTKNQVSLTCLVKGFYPSDIAVEWESNGQPENNYKTTPPVLDSDGSFFLTSKLTVDKSRWQQGNVFSCSVMHEALHNHYTQKSLSLSPG

SEQ ID NO: 10 - protein, 374 aa, Artificial Sequence
  IL-2 Fc fusion protein
APTSSSTKKTQLQLEHLLLDLQMILNGINNYKNPKLTRMLTFKFYMPKKATELKHLQCLEEELKPLEEVLNLAQSKNFHLRPRDLISRINVIVLELKGSETTFMCEYADETATIVEFLNRWITFSQSIISTLTGGGGSGGGGSGGGGSDKTHTCPPCPAPELLGGPSVFLFPPKPKDTLMISRTPEVTCVVVDVSHEDPEVKFNWYVDGVEVHNAKTKPREEQYASTYRVVSVLTVLHQDWLNGKEYKCKVSNKALPAPIEKTISKAKGQPREPQVYVLPPSRDELTKNQVSLLCLVKGFYPSDIAVEWESNGQPENNYLTWPPVLDSDGSFFLYSKLTVDKSRWQQGNVFSCSVMHEALHNHYTQKSLSLSPG

SEQ ID NO: 11 - protein, 374 aa, Artificial Sequence
  IL2 Fc fusion protein
DKTHTCPPCPAPELLGGPSVFLFPPKPKDTLMISRTPEVTCVVVDVSHEDPEVKFNWYVDGVEVHNAKTKPREEQYASTYRVVSVLTVLHQDWLNGKEYKCKVSNKALPAPIEKTISKAKGQPREPQVYVLPPSRDELTKNQVSLLCLVKGFYPSDIAVEWESNGQPENNYLTWPPVLDSDGSFFLYSKLTVDKSRWQQGNVFSCSVMHEALHNHYTQKSLSLSPGGGGGSGGGGSGGGGSAPTSSSTKKTQLQLEHLLLDLQMILNGINNYKNPKLTRMLTFKFYMPKKATELKHLQCLEEELKPLEEVLNLAQSKNFHLRPRDLISRINVIVLELKGSETTFMCEYADETATIVEFLNRWITFSQSIISTLT

SEQ ID NO: 12 - protein, 598 aa, Artificial Sequence
  Ab2HeavyIL2vC
EVQLVQSGAEVKKPGESLKISCKGSGYSFTNYWIGWVRQMPGKGLEWMGIIYPGNSDTRFSPSFQGQVTISADKSITTAYLQWSSLKASDTAMYYCARHGTSSDYYGLDVWGQGTTVTVSSASTKGPSVFPLAPSSKSTSGGTAALGCLVKDYFPEPVTVSWNSGALTSGVHTFPAVLQSSGLYSLSSVVTVPSSSLGTQTYICNVNHKPSNTKVDKKVEPKSCDKTHTCPPCPAPELLGGPSVFLFPPKPKDTLMISRTPEVTCVVVDVSHEDPEVKFNWYVDGVEVHNAKTKPREEQYASTYRVVSVLTVLHQDWLNGKEYKCKVSNKALPAPIEKTISKAKGQPREPQVYTLPPSRDELTKNQVSLTCLVKGFYPSDIAVEWESNGQPENNYKTTPPVLDSDGSFFLYSKLTVDKSRWQQGNVFSCSVMHEALHNHYTQKSLSLSPGGGGGSGGGGSGGGGSAPTSSSTKKTQLQLEHLLLDLQMILNGINNYKNPKLTRMLTFKFYMPKKATELKHLQCLEEELKPLEEVLNLAQSKNFHLRPRDLISRINVIVLELKGSETTFMCEYADETATIVEFLNRWITFSQSIISTLT

SEQ ID NO: 13 - protein, 594 aa, Artificial Sequence
  Ab4HeavyIL2vC
QVQLVQSGAEVKKPGASVKVSCEVSGFILTELSVNWVRQAPGKGLEWMGGFDPEDGKTIYAQKFQGRVTLTEDTSTDTAYMELSSLRSEDTAVYYCATWWDFHFDFWGQGTLVTVSSASTKGPSVFPLAPSSKSTSGGTAALGCLVKDYFPEPVTVSWNSGALTSGVHTFPAVLQSSGLYSLSSVVTVPSSSLGTQTYICNVNHKPSNTKVDKKVEPKSCDKTHTCPPCPAPELLGGPSVFLFPPKPKDTLMISRTPEVTCVVVDVSHEDPEVKFNWYVDGVEVHNAKTKPREEQYASTYRVVSVLTVLHQDWLNGKEYKCKVSNKALPAPIEKTISKAKGQPREPQVYTLPPSRDELTKNQVSLTCLVKGFYPSDIAVEWESNGQPENNYKTTPPVLDSDGSFFLYSKLTVDKSRWQQGNVFSCSVMHEALHNHYTQKSLSLSPGGGGGSGGGGSGGGGSAPTSSSTKKTQLQLEHLLLDLQMILNGINNYKNPKLTRMLTFKFYMPKKATELKHLQCLEEELKPLEEVLNLAQSKNFHLRPRDLISRINVIVLELKGSETTFMCEYADETATIVEFLNRWITFSQSIISTLT

SEQ ID NO: 14 - protein, 598 aa, Artificial Sequence
  Ab2HeavyIL2vC(W)
EVQLVQSGAEVKKPGESLKISCKGSGYSFTNYWIGWVRQMPGKGLEWMGIIYPGNSDTRFSPSFQGQVTISADKSITTAYLQWSSLKASDTAMYYCARHGTSSDYYGLDVWGQGTTVTVSSASTKGPSVFPLAPSSKSTSGGTAALGCLVKDYFPEPVTVSWNSGALTSGVHTFPAVLQSSGLYSLSSVVTVPSSSLGTQTYICNVNHKPSNTKVDKKVEPKSCDKTHTCPPCPAPELLGGPSVFLFPPKPKDTLMISRTPEVTCVVVDVSHEDPEVKFNWYVDGVEVHNAKTKPREEQYASTYRVVSVLTVLHQDWLNGKEYKCKVSNKALPAPIEKTISKAKGQPREPQVYVLPPSRDELTKNQVSLLCLVKGFYPSDIAVEWESNGQPENNYLTWPPVLDSDGSFFLYSKLTVDKSRWQQGNVFSCSVMHEALHNHYTQKSLSLSPGGGGGSGGGGSGGGGSAPTSSSTKKTQLQLEHLLLDLQMILNGINNYKNPKLTRMLTFKFYMPKKATELKHLQCLEEELKPLEEVLNLAQSKNFHLRPRDLISRINVIVLELKGSETTFMCEYADETATIVEFLNRWITFSQSIISTLT

SEQ ID NO: 15 - protein, 594 aa, Artificial Sequence
  Ab4HeavyIL2vC(W)
QVQLVQSGAEVKKPGASVKVSCEVSGFILTELSVNWVRQAPGKGLEWMGGFDPEDGKTIYAQKFQGRVTLTEDTSTDTAYMELSSLRSEDTAVYYCATWWDFHFDFWGQGTLVTVSSASTKGPSVFPLAPSSKSTSGGTAALGCLVKDYFPEPVTVSWNSGALTSGVHTFPAVLQSSGLYSLSSVVTVPSSSLGTQTYICNVNHKPSNTKVDKKVEPKSCDKTHTCPPCPAPELLGGPSVFLFPPKPKDTLMISRTPEVTCVVVDVSHEDPEVKFNWYVDGVEVHNAKTKPREEQYASTYRVVSVLTVLHQDWLNGKEYKCKVSNKALPAPIEKTISKAKGQPREPQVYVLPPSRDELTKNQVSLLCLVKGFYPSDIAVEWESNGQPENNYLTWPPVLDSDGSFFLYSKLTVDKSRWQQGNVFSCSVMHEALHNHYTQKSLSLSPGGGGGSGGGGSGGGGSAPTSSSTKKTQLQLEHLLLDLQMILNGINNYKNPKLTRMLTFKFYMPKKATELKHLQCLEEELKPLEEVLNLAQSKNFHLRPRDLISRINVIVLELKGSETTFMCEYADETATIVEFLNRWITFSQSIISTLT

SEQ ID NO: 16 - protein, 450 aa, Artificial Sequence
  Ab2Heavy(V)
EVQLVQSGAEVKKPGESLKISCKGSGYSFTNYWIGWVRQMPGKGLEWMGIIYPGNSDTRFSPSFQGQVTISADKSITTAYLQWSSLKASDTAMYYCARHGTSSDYYGLDVWGQGTTVTVSSASTKGPSVFPLAPSSKSTSGGTAALGCLVKDYFPEPVTVSWNSGALTSGVHTFPAVLQSSGLYSLSSVVTVPSSSLGTQTYICNVNHKPSNTKVDKKVEPKSCDKTHTCPPCPAPELLGGPSVFLFPPKPKDTLMISRTPEVTCVVVDVSHEDPEVKFNWYVDGVEVHNAKTKPREEQYASTYRVVSVLTVLHQDWLNGKEYKCKVSNKALPAPIEKTISKAKGQPREPQVYVYPPSRDELTKNQVSLTCLVKGFYPSDIAVEWESNGQPENNYKTTPPVLDSDGSFALVSKLTVDKSRWQQGNVFSCSVMHEALHNHYTQKSLSLSPG

SEQ ID NO: 17 - protein, 446 aa, Artificial Sequence
  Ab4Heavy(V)
QVQLVQSGAEVKKPGASVKVSCEVSGFILTELSVNWVRQAPGKGLEWMGGFDPEDGKTIYAQKFQGRVTLTEDTSTDTAYMELSSLRSEDTAVYYCATWWDFHFDFWGQGTLVTVSSASTKGPSVFPLAPSSKSTSGGTAALGCLVKDYFPEPVTVSWNSGALTSGVHTFPAVLQSSGLYSLSSVVTVPSSSLGTQTYICNVNHKPSNTKVDKKVEPKSCDKTHTCPPCPAPELLGGPSVFLFPPKPKDTLMISRTPEVTCVVVDVSHEDPEVKFNWYVDGVEVHNAKTKPREEQYASTYRVVSVLTVLHQDWLNGKEYKCKVSNKALPAPIEKTISKAKGQPREPQVYVYPPSRDELTKNQVSLTCLVKGFYPSDIAVEWESNGQPENNYKTTPPVLDSDGSFALVSKLTVDKSRWQQGNVFSCSVMHEALHNHYTQKSLSLSPG

SEQ ID NO: 18 - protein, 374 aa, Artificial Sequence
  IL2vCFc(V)
DKTHTCPPCPAPELLGGPSVFLFPPKPKDTLMISRTPEVTCVVVDVSHEDPEVKFNWYVDGVEVHNAKTKPREEQYASTYRVVSVLTVLHQDWLNGKEYKCKVSNKALPAPIEKTISKAKGQPREPQVYVYPPSRDELTKNQVSLTCLVKGFYPSDIAVEWESNGQPENNYKTTPPVLDSDGSFALVSKLTVDKSRWQQGNVFSCSVMHEALHNHYTQKSLSLSPGGGGGSGGGGSGGGGSAPTSSSTKKTQLQLEHLLLDLQMILNGINNYKNPKLTRMLTFKFYMPKKATELKHLQCLEEELKPLEEVLNLAQSKNFHLRPRDLISRINVIVLELKGSETTFMCEYADETATIVEFLNRWITFSQSIISTLT

SEQ ID NO: 19 - protein, 214 aa, Artificial Sequence
  Ab2Kappa
DIQMTQSPSSLSASVGDRVTITCQASQDISNYLNWYQQKPGKAPKLLIYDASNLETGVPSRFSGSGSGTDFTFTISSLQPEDIATYYCQQDDNFPLTFGGGTKVEIKRTVAAPSVFIFPPSDEQLKSGTASVVCLLNNFYPREAKVQWKVDNALQSGNSQESVTEQDSKDSTYSLSSTLTLSKADYEKHKVYACEVTHQGLSSPVTKSFNRGEC

SEQ ID NO: 20 - protein, 219 aa, Artificial Sequence
  Ab4Kappa
DFVMTQTPLSLSVTPGQPASISCKSSQSLLHSNGKTYLYWFLQKPGQPPQLLIYEVSNRFSGVPDRFSGSGSGTDFTLKISRVEAEDVGVYYCMQSIQLPLTFGGGTKVEIKRTVAAPSVFIFPPSDEQLKSGTASVVCLLNNFYPREAKVQWKVDNALQSGNSQESVTEQDSKDSTYSLSSTLTLSKADYEKHKVYACEVTHQGLSSPVTKSFNRGEC

SEQ ID NO: 21 - protein, 5 aa, Artificial Sequence
  Peptide Linker
GGGGS

SEQ ID NO: 22 - DNA, 1434 bp, Artificial Sequence
  IgG1 heavy chain
atggaccccaagggcagcctgagctggagaatcctgctgttcctgagcctggccttcgagctgagctacggccaggtgcagttggttcagagcggggctgaggtgaagaagcccggcagcagcgtgaaggtgagctgcaaggccagcggcggtaccttcagcagctacgccatcagctgggtgaggcaggcacccggccagggcctggagtggatgggcggcatcatccccatctttggcactgccaactacgcccagaagttccagggcagggtgaccatcacagccgacgagagcacctctaccgcctacatggagctgagcagcctgaggagcgaggacaccgccgtgtactactgcgccaagagcatcctgggaggaaggatcttcggcggctacttcgacctgtggggtcgcgggaccctggtgaccgtgtcatctgccagcaccaagggccccagcgtgttccctctggcccccagcagcaagagcaccagcggcggaaccgccgccctgggctgcctggtgaaggactacttccccgagcccgtgaccgtgtcctggaacagcggcgctctgaccagcggagtgcacaccttccctgccgtgctgcagagcagcggcctgtactccctgagcagcgtggtgaccgtgcccagcagcagcctgggcacccagacctacatctgcaacgtgaaccacaagccctccaacaccaaggtggacaagaaggtggagcctaagagctgcgacaagacccacacctgccctccctgccccgcccccgagctgctgggcggacccagcgtgttcctgttccctcccaagcccaaggacaccctgatgatcagccgcacccccgaggtgacctgcgtggtggtggacgtgagccacgaggaccccgaggtgaagttcaactggtacgtggacggcgtggaggtgcacaacgccaagaccaagcctcgggaggagcagtacaactccacctaccgcgtggtgagcgtgctgaccgtgctgcaccaggactggctgaacggcaaggagtacaagtgcaaggtgagcaacaaggccctgcccgctcccatcgagaagaccatcagcaaggccaagggccagccccgggagcctcaggtgtacaccctgccccccagccgcgaagagatgaccaagaaccaggtgagcctgacctgcctggtgaagggcttctacccctccgacatcgccgtggagtgggagagcaacggccagcctgagaacaactacaagaccacccctcccgtgctggacagcgacggcagcttcttcctgtacagcaagctgaccgtggacaagtcccggtggcagcagggcaacgtgttcagctgcagcgtgatgcacgaggccctgcacaaccactacacccagaagagcctgagcctgagccccggatagtaa

SEQ ID NO: 23 - protein, 476 aa, Artificial Sequence
  IgG1 heavy chain
MDPKGSLSWRILLFLSLAFELSYGQVQLVQSGAEVKKPGSSVKVSCKASGGTFSSYAISWVRQAPGQGLEWMGGIIPIFGTANYAQKFQGRVTITADESTSTAYMELSSLRSEDTAVYYCAKSILGGRIFGGYFDLWGRGTLVTVSSASTKGPSVFPLAPSSKSTSGGTAALGCLVKDYFPEPVTVSWNSGALTSGVHTFPAVLQSSGLYSLSSVVTVPSSSLGTQTYICNVNHKPSNTKVDKKVEPKSCDKTHTCPPCPAPELLGGPSVFLFPPKPKDTLMISRTPEVTCVVVDVSHEDPEVKFNWYVDGVEVHNAKTKPREEQYNSTYRVVSVLTVLHQDWLNGKEYKCKVSNKALPAPIEKTISKAKGQPREPQVYTLPPSREEMTKNQVSLTCLVKGFYPSDIAVEWESNGQPENNYKTTPPVLDSDGSFFLYSKLTVDKSRWQQGNVFSCSVMHEALHNHYTQKSLSLSPG

SEQ ID NO: 24 - DNA, 1431 bp, Artificial Sequence
  IgG1 heavy chain
atggaccccaagggcagcctgagctggagaatcctgctgttcctgagcctggccttcgagctgagctacggccaggtgcagctggtgcagagcggagccgaggtgaagaagcccggcagcagcgtgaaggtgagctgcaaggccagcggctacacctttagcgactactacgtgcactgggtgaggcaagcacccggtcagggcctggagtggatgggcggcatcatccccatcgtgggcaccgccaactacgcccagaagttccagggtagggtgaccatcaccgcagacgagtctaccagcaccgcgtacatggagctgagcagcctgaggagcgaggacaccgccgtttactactgcgccagggcaggtggcggggactacaagagctactacttcgactattggggcaggggcaccctggtgaccgtgagctctgccagcaccaagggccccagcgtgttccctctggcccccagcagcaagagcaccagcggcggaaccgccgccctgggctgcctggtgaaggactacttccccgagcccgtgaccgtgtcctggaacagcggcgctctgaccagcggagtgcacaccttccctgccgtgctgcagagcagcggcctgtactccctgagcagcgtggtgaccgtgcccagcagcagcctgggcacccagacctacatctgcaacgtgaaccacaagccctccaacaccaaggtggacaagaaggtggagcctaagagctgcgacaagacccacacctgccctccctgccccgcccccgagctgctgggcggacccagcgtgttcctgttccctcccaagcccaaggacaccctgatgatcagccgcacccccgaggtgacctgcgtggtggtggacgtgagccacgaggaccccgaggtgaagttcaactggtacgtggacggcgtggaggtgcacaacgccaagaccaagcctcgggaggagcagtacaactccacctaccgcgtggtgagcgtgctgaccgtgctgcaccaggactggctgaacggcaaggagtacaagtgcaaggtgagcaacaaggccctgcccgctcccatcgagaagaccatcagcaaggccaagggccagccccgggagcctcaggtgtacaccctgccccccagccgcgaagagatgaccaagaaccaggtgagcctgacctgcctggtgaagggcttctacccctccgacatcgccgtggagtgggagagcaacggccagcctgagaacaactacaagaccacccctcccgtgctggacagcgacggcagcttcttcctgtacagcaagctgaccgtggacaagtcccggtggcagcagggcaacgtgttcagctgcagcgtgatgcacgaggccctgcacaaccactacacccagaagagcctgagcctgagccccggatagtaa

SEQ ID NO: 25 - protein, 475 aa, Artificial Sequence
  IgG1 heavy chain
MDPKGSLSWRILLFLSLAFELSYGQVQLVQSGAEVKKPGSSVKVSCKASGYTFSDYYVHWVRQAPGQGLEWMGGIIPIVGTANYAQKFQGRVTITADESTSTAYMELSSLRSEDTAVYYCARAGGGDYKSYYFDYWGRGTLVTVSSASTKGPSVFPLAPSSKSTSGGTAALGCLVKDYFPEPVTVSWNSGALTSGVHTFPAVLQSSGLYSLSSVVTVPSSSLGTQTYICNVNHKPSNTKVDKKVEPKSCDKTHTCPPCPAPELLGGPSVFLFPPKPKDTLMISRTPEVTCVVVDVSHEDPEVKFNWYVDGVEVHNAKTKPREEQYNSTYRVVSVLTVLHQDWLNGKEYKCKVSNKALPAPIEKTISKAKGQPREPQVYTLPPSREEMTKNQVSLTCLVKGFYPSDIAVEWESNGQPENNYKTTPPVLDSDGSFFLYSKLTVDKSRWQQGNVFSCSVMHEALHNHYTQKSLSLSPG

SEQ ID NO: 26 - DNA, 1428 bp, Artificial Sequence
  IgG1 heavy chain
atggaccccaagggcagcctgagctggagaatcctgctgttcctgagcctggccttcgagctgagctacggccaggtgcagctggtgcagagtggggcggaggtgaagaagcccggcagcagcgtgaaggtgagctgcaaggccagcggcggaacctttagcagctacgccttcagctgggtgcgacaggcccctggacagggcctggagtggatgggcggcatcatccccatcttcggcacccccaactacgcccagaagttccaaggccgggtgaccatcactgccgacgagagcacctccaccgcctacatggagctcagcagcctgaggagcgaggacaccgccgtgtactactgcgccagggtgagggccaagaggcccaactggtacttcgacctgtggggcaggggcaccctcgtgaccgtgagcagcgccagcaccaagggccccagcgtgttccctctggcccccagcagcaagagcaccagcggcggaaccgccgccctgggctgcctggtgaaggactacttccccgagcccgtgaccgtgtcctggaacagcggcgctctgaccagcggagtgcacaccttccctgccgtgctgcagagcagcggcctgtactccctgagcagcgtggtgaccgtgcccagcagcagcctgggcacccagacctacatctgcaacgtgaaccacaagccctccaacaccaaggtggacaagaaggtggagcctaagagctgcgacaagacccacacctgccctccctgccccgcccccgagctgctgggcggacccagcgtgttcctgttccctcccaagcccaaggacaccctgatgatcagccgcacccccgaggtgacctgcgtggtggtggacgtgagccacgaggaccccgaggtgaagttcaactggtacgtggacggcgtggaggtgcacaacgccaagaccaagcctcgggaggagcagtacaactccacctaccgcgtggtgagcgtgctgaccgtgctgcaccaggactggctgaacggcaaggagtacaagtgcaaggtgagcaacaaggccctgcccgctcccatcgagaagaccatcagcaaggccaagggccagccccgggagcctcaggtgtacaccctgccccccagccgcgaagagatgaccaagaaccaggtgagcctgacctgcctggtgaagggcttctacccctccgacatcgccgtggagtgggagagcaacggccagcctgagaacaactacaagaccacccctcccgtgctggacagcgacggcagcttcttcctgtacagcaagctgaccgtggacaagtcccggtggcagcagggcaacgtgttcagctgcagcgtgatgcacgaggccctgcacaaccactacacccagaagagcctgagcctgagccccggatagtaa

SEQ ID NO: 27 - protein, 474 aa, Artificial Sequence
  IgG1 heavy chain
MDPKGSLSWRILLFLSLAFELSYGQVQLVQSGAEVKKPGSSVKVSCKASGGTFSSYAFSWVRQAPGQGLEWMGGIIPIFGTPNYAQKFQGRVTITADESTSTAYMELSSLRSEDTAVYYCARVRAKRPNWYFDLWGRGTLVTVSSASTKGPSVFPLAPSSKSTSGGTAALGCLVKDYFPEPVTVSWNSGALTSGVHTFPAVLQSSGLYSLSSVVTVPSSSLGTQTYICNVNHKPSNTKVDKKVEPKSCDKTHTCPPCPAPELLGGPSVFLFPPKPKDTLMISRTPEVTCVVVDVSHEDPEVKFNWYVDGVEVHNAKTKPREEQYNSTYRVVSVLTVLHQDWLNGKEYKCKVSNKALPAPIEKTISKAKGQPREPQVYTLPPSREEMTKNQVSLTCLVKGFYPSDIAVEWESNGQPENNYKTTPPVLDSDGSFFLYSKLTVDKSRWQQGNVFSCSVMHEALHNHYTQKSLSLSPG

SEQ ID NO: 28 - DNA, 1437 bp, Artificial Sequence
  IgG1 heavy chain
atggaccccaagggcagcctgagctggagaatcctgctgttcctgagcctggccttcgagctgagctacggccaggtgcagctcgtgcagagcggtgcggaggtgaagaagcccggcagcagcgtgaaggtaagctgcaaggccagcggtggcaccttcagcacctttggcgtgagctgggtgaggcaagccccaggccaaggcctggagtggatgggcaggatcatccccatcctggccaccaccaactacgcccagaagttccagggcagggtgaccatcaccgcagacgagagcaccagcaccgcctacatggagctgagcagcctgaggagcgaggataccgccgtgtactactgcgcctctggcgactactatgacagctctggctactacggctacttccagcactggggccagggaaccctggtgaccgttagctccgccagcaccaagggccccagcgtgttccctctggcccccagcagcaagagcaccagcggcggaaccgccgccctgggctgcctggtgaaggactacttccccgagcccgtgaccgtgtcctggaacagcggcgctctgaccagcggagtgcacaccttccctgccgtgctgcagagcagcggcctgtactccctgagcagcgtggtgaccgtgcccagcagcagcctgggcacccagacctacatctgcaacgtgaaccacaagccctccaacaccaaggtggacaagaaggtggagcctaagagctgcgacaagacccacacctgccctccctgccccgcccccgagctgctgggcggacccagcgtgttcctgttccctcccaagcccaaggacaccctgatgatcagccgcacccccgaggtgacctgcgtggtggtggacgtgagccacgaggaccccgaggtgaagttcaactggtacgtggacggcgtggaggtgcacaacgccaagaccaagcctcgggaggagcagtacaactccacctaccgcgtggtgagcgtgctgaccgtgctgcaccaggactggctgaacggcaaggagtacaagtgcaaggtgagcaacaaggccctgcccgctcccatcgagaagaccatcagcaaggccaagggccagccccgggagcctcaggtgtacaccctgccccccagccgcgaagagatgaccaagaaccaggtgagcctgacctgcctggtgaagggcttctacccctccgacatcgccgtggagtgggagagcaacggccagcctgagaacaactacaagaccacccctcccgtgctggacagcgacggcagcttcttcctgtacagcaagctgaccgtggacaagtcccggtggcagcagggcaacgtgttcagctgcagcgtgatgcacgaggccctgcacaaccactacacccagaagagcctgagcctgagccccggatagtaa

SEQ ID NO: 29 - protein, 477 aa, Artificial Sequence
  IgG1 heavy chain
MDPKGSLSWRILLFLSLAFELSYGQVQLVQSGAEVKKPGSSVKVSCKASGGTFSTFGVSWVRQAPGQGLEWMGRIIPILATTNYAQKFQGRVTITADESTSTAYMELSSLRSEDTAVYYCASGDYYDSSGYYGYFQHWGQGTLVTVSSASTKGPSVFPLAPSSKSTSGGTAALGCLVKDYFPEPVTVSWNSGALTSGVHTFPAVLQSSGLYSLSSVVTVPSSSLGTQTYICNVNHKPSNTKVDKKVEPKSCDKTHTCPPCPAPELLGGPSVFLFPPKPKDTLMISRTPEVTCVVVDVSHEDPEVKFNWYVDGVEVHNAKTKPREEQYNSTYRVVSVLTVLHQDWLNGKEYKCKVSNKALPAPIEKTISKAKGQPREPQVYTLPPSREEMTKNQVSLTCLVKGFYPSDIAVEWESNGQPENNYKTTPPVLDSDGSFFLYSKLTVDKSRWQQGNVFSCSVMHEALHNHYTQKSLSLSPG

SEQ ID NO: 30 - DNA, 1416 bp, Artificial Sequence
  IgG1 heavy chain
atggaccccaagggcagcctgagctggagaatcctgctgttcctgagcctggccttcgagctgagctacggcgaggttcagctcctggagagcggcggaggtctggtgcagccagggggtagcctgaggctgagctgcgccgcaagcggcttcaccttcagcagctactggatgagctgggtgaggcaggcacccggcaagggcctggagtgggttagtagcattagcagcgacaccacttacaagtactacgccgacagcgtgaagggcaggttcacgatcagcagggacaattctaagaacaccctgtacctgcagatgaacagcctgcgagccgaggacaccgccgtgtactactgcgccagggaggtggacactgccatgaagaactggggccagggcaccctggtgaccgttagctctgccagcaccaagggccccagcgtgttccctctggcccccagcagcaagagcaccagcggcggaaccgccgccctgggctgcctggtgaaggactacttccccgagcccgtgaccgtgtcctggaacagcggcgctctgaccagcggagtgcacaccttccctgccgtgctgcagagcagcggcctgtactccctgagcagcgtggtgaccgtgcccagcagcagcctgggcacccagacctacatctgcaacgtgaaccacaagccctccaacaccaaggtggacaagaaggtggagcctaagagctgcgacaagacccacacctgccctccctgccccgcccccgagctgctgggcggacccagcgtgttcctgttccctcccaagcccaaggacaccctgatgatcagccgcacccccgaggtgacctgcgtggtggtggacgtgagccacgaggaccccgaggtgaagttcaactggtacgtggacggcgtggaggtgcacaacgccaagaccaagcctcgggaggagcagtacaactccacctaccgcgtggtgagcgtgctgaccgtgctgcaccaggactggctgaacggcaaggagtacaagtgcaaggtgagcaacaaggccctgcccgctcccatcgagaagaccatcagcaaggccaagggccagccccgggagcctcaggtgtacaccctgccccccagccgcgaagagatgaccaagaaccaggtgagcctgacctgcctggtgaagggcttctacccctccgacatcgccgtggagtgggagagcaacggccagcctgagaacaactacaagaccacccctcccgtgctggacagcgacggcagcttcttcctgtacagcaagctgaccgtggacaagtcccggtggcagcagggcaacgtgttcagctgcagcgtgatgcacgaggccctgcacaaccactacacccagaagagcctgagcctgagccccggatagtaa

SEQ ID NO: 31 - protein, 470 aa, Artificial Sequence
  IgG1 heavy chain
MDPKGSLSWRILLFLSLAFELSYGEVQLLESGGGLVQPGGSLRLSCAASGFTFSSYWMSWVRQAPGKGLEWVSSISSDTTYKYYADSVKGRFTISRDNSKNTLYLQMNSLRAEDTAVYYCAREVDTAMKNWGQGTLVTVSSASTKGPSVFPLAPSSKSTSGGTAALGCLVKDYFPEPVTVSWNSGALTSGVHTFPAVLQSSGLYSLSSVVTVPSSSLGTQTYICNVNHKPSNTKVDKKVEPKSCDKTHTCPPCPAPELLGGPSVFLFPPKPKDTLMISRTPEVTCVVVDVSHEDPEVKFNWYVDGVEVHNAKTKPREEQYNSTYRVVSVLTVLHQDWLNGKEYKCKVSNKALPAPIEKTISKAKGQPREPQVYTLPPSREEMTKNQVSLTCLVKGFYPSDIAVEWESNGQPENNYKTTPPVLDSDGSFFLYSKLTVDKSRWQQGNVFSCSVMHEALHNHYTQKSLSLSPG

SEQ ID NO: 32 - DNA, 1422 bp, Artificial Sequence
  IgG1 heavy chain
atggaccccaagggcagcctgagctggagaatcctgctgttcctgagcctggccttcgagctgagctacggcgaggtgcaactgctggaaagcggtggcggcctcgtgaagcccggtgggagcctgaggctgagctgcgccgcaagcggattcacattcagcagctactggatgagctgggtgcgccaagccccaggaaagggcctggagtgggtgagcgccatcggcggctcaggggcaggcacctactatgccgatagcgtgaagggcaggttcaccattagcctggacgacagcaagaacaccctgtacctgcagatgaacagcctgaagaccgaggacaccgccgtgtactactgcgccaggttgagcactgtgaccaggggcttcgactactggggccagggcaccctggtgacagttagctccgcaagcaccaagggccccagcgtgttccctctggcccccagcagcaagagcaccagcggcggaaccgccgccctgggctgcctggtgaaggactacttccccgagcccgtgaccgtgtcctggaacagcggcgctctgaccagcggagtgcacaccttccctgccgtgctgcagagcagcggcctgtactccctgagcagcgtggtgaccgtgcccagcagcagcctgggcacccagacctacatctgcaacgtgaaccacaagccctccaacaccaaggtggacaagaaggtggagcctaagagctgcgacaagacccacacctgccctccctgccccgcccccgagctgctgggcggacccagcgtgttcctgttccctcccaagcccaaggacaccctgatgatcagccgcacccccgaggtgacctgcgtggtggtggacgtgagccacgaggaccccgaggtgaagttcaactggtacgtggacggcgtggaggtgcacaacgccaagaccaagcctcgggaggagcagtacaactccacctaccgcgtggtgagcgtgctgaccgtgctgcaccaggactggctgaacggcaaggagtacaagtgcaaggtgagcaacaaggccctgcccgctcccatcgagaagaccatcagcaaggccaagggccagccccgggagcctcaggtgtacaccctgccccccagccgcgaagagatgaccaagaaccaggtgagcctgacctgcctggtgaagggcttctacccctccgacatcgccgtggagtgggagagcaacggccagcctgagaacaactacaagaccacccctcccgtgctggacagcgacggcagcttcttcctgtacagcaagctgaccgtggacaagtcccggtggcagcagggcaacgtgttcagctgcagcgtgatgcacgaggccctgcacaaccactacacccagaagagcctgagcctgagccccggatagtaa

SEQ ID NO: 33 - protein, 472 aa, Artificial Sequence
  IgG1 heavy chain
MDPKGSLSWRILLFLSLAFELSYGEVQLLESGGGLVKPGGSLRLSCAASGFTFSSYWMSWVRQAPGKGLEWVSAIGGSGAGTYYADSVKGRFTISLDDSKNTLYLQMNSLKTEDTAVYYCARLSTVTRGFDYWGQGTLVTVSSASTKGPSVFPLAPSSKSTSGGTAALGCLVKDYFPEPVTVSWNSGALTSGVHTFPAVLQSSGLYSLSSVVTVPSSSLGTQTYICNVNHKPSNTKVDKKVEPKSCDKTHTCPPCPAPELLGGPSVFLFPPKPKDTLMISRTPEVTCVVVDVSHEDPEVKFNWYVDGVEVHNAKTKPREEQYNSTYRVVSVLTVLHQDWLNGKEYKCKVSNKALPAPIEKTISKAKGQPREPQVYTLPPSREEMTKNQVSLTCLVKGFYPSDIAVEWESNGQPENNYKTTPPVLDSDGSFFLYSKLTVDKSRWQQGNVFSCSVMHEALHNHYTQKSLSLSPG

SEQ ID NO: 34 - DNA, 1443 bp, Artificial Sequence
  IgG1 heavy chain
atggaccccaagggcagcctgagctggagaatcctgctgttcctgagcctggccttcgagctgagctacggccaggtgcagctggtgcagagcggtgccgaggtgaagaagcccggtgcgagcgtaaaggtgagctgcaaggccagcggctacaccttcaccgacagctacatccattgggtgaggcaggcacccggccagggcctggagtggatgggctggatgaaccccaacagcggcaacaccggctacgcccagaagttccagggcagggtgaccatgaccagggacaccagcacctccaccgtttatatggagctgagcagcctgaggagcgaggacaccgccgtgtactactgcgccaggggcgtgttcgactacggggactatggctactactaccactacatggacgtgtggggcaagggcaccacagtgaccgtgagctctgccagcaccaagggccccagcgtgttccctctggcccccagcagcaagagcaccagcggcggaaccgccgccctgggctgcctggtgaaggactacttccccgagcccgtgaccgtgtcctggaacagcggcgctctgaccagcggagtgcacaccttccctgccgtgctgcagagcagcggcctgtactccctgagcagcgtggtgaccgtgcccagcagcagcctgggcacccagacctacatctgcaacgtgaaccacaagccctccaacaccaaggtggacaagaaggtggagcctaagagctgcgacaagacccacacctgccctccctgccccgcccccgagctgctgggcggacccagcgtgttcctgttccctcccaagcccaaggacaccctgatgatcagccgcacccccgaggtgacctgcgtggtggtggacgtgagccacgaggaccccgaggtgaagttcaactggtacgtggacggcgtggaggtgcacaacgccaagaccaagcctcgggaggagcagtacaactccacctaccgcgtggtgagcgtgctgaccgtgctgcaccaggactggctgaacggcaaggagtacaagtgcaaggtgagcaacaaggccctgcccgctcccatcgagaagaccatcagcaaggccaagggccagccccgggagcctcaggtgtacaccctgccccccagccgcgaagagatgaccaagaaccaggtgagcctgacctgcctggtgaagggcttctacccctccgacatcgccgtggagtgggagagcaacggccagcctgagaacaactacaagaccacccctcccgtgctggacagcgacggcagcttcttcctgtacagcaagctgaccgtggacaagtcccggtggcagcagggcaacgtgttcagctgcagcgtgatgcacgaggccctgcacaaccactacacccagaagagcctgagcctgagccccggatagtaa

SEQ ID NO: 35 - protein, 479 aa, Artificial Sequence
  IgG1 heavy chain
MDPKGSLSWRILLFLSLAFELSYGQVQLVQSGAEVKKPGASVKVSCKASGYTFTDSYIHWVRQAPGQGLEWMGWMNPNSGNTGYAQKFQGRVTMTRDTSTSTVYMELSSLRSEDTAVYYCARGVFDYGDYGYYYHYMDVWGKGTTVTVSSASTKGPSVFPLAPSSKSTSGGTAALGCLVKDYFPEPVTVSWNSGALTSGVHTFPAVLQSSGLYSLSSVVTVPSSSLGTQTYICNVNHKPSNTKVDKKVEPKSCDKTHTCPPCPAPELLGGPSVFLFPPKPKDTLMISRTPEVTCVVVDVSHEDPEVKFNWYVDGVEVHNAKTKPREEQYNSTYRVVSVLTVLHQDWLNGKEYKCKVSNKALPAPIEKTISKAKGQPREPQVYTLPPSREEMTKNQVSLTCLVKGFYPSDIAVEWESNGQPENNYKTTPPVLDSDGSFFLYSKLTVDKSRWQQGNVFSCSVMHEALHNHYTQKSLSLSPG

SEQ ID NO: 36 - DNA, 1437 bp, Artificial Sequence
  IgG1 heavy chain
atggaccccaagggcagcctgagctggagaatcctgctgttcctgagcctggccttcgagctgagctacggccaggtgcaactggtgcagagcggtgcggaggtgaagaagccgggagccagcgtgaaggtgagctgcaaagccagtggcggcacctttagcagctacgccatcagctgggtgaggcaggcccctgggcagggcctggagtggatgggctggatcagccccgacaacggcaacaccaactacgcccagaagctgcagggacgagtgaccatgaccagggacaccagcactagcaccgtgtatatggagctgagcagcctgaggagcgaggacaccgccgtgtactactgcgccaggctggcctacgacaccggctactactattattactacatggacgtgtggggcaaggggaccaccgtgaccgtgagctctgccagcaccaagggccccagcgtgttccctctggcccccagcagcaagagcaccagcggcggaaccgccgccctgggctgcctggtgaaggactacttccccgagcccgtgaccgtgtcctggaacagcggcgctctgaccagcggagtgcacaccttccctgccgtgctgcagagcagcggcctgtactccctgagcagcgtggtgaccgtgcccagcagcagcctgggcacccagacctacatctgcaacgtgaaccacaagccctccaacaccaaggtggacaagaaggtggagcctaagagctgcgacaagacccacacctgccctccctgccccgcccccgagctgctgggcggacccagcgtgttcctgttccctcccaagcccaaggacaccctgatgatcagccgcacccccgaggtgacctgcgtggtggtggacgtgagccacgaggaccccgaggtgaagttcaactggtacgtggacggcgtggaggtgcacaacgccaagaccaagcctcgggaggagcagtacaactccacctaccgcgtggtgagcgtgctgaccgtgctgcaccaggactggctgaacggcaaggagtacaagtgcaaggtgagcaacaaggccctgcccgctcccatcgagaagaccatcagcaaggccaagggccagccccgggagcctcaggtgtacaccctgccccccagccgcgaagagatgaccaagaaccaggtgagcctgacctgcctggtgaagggcttctacccctccgacatcgccgtggagtgggagagcaacggccagcctgagaacaactacaagaccacccctcccgtgctggacagcgacggcagcttcttcctgtacagcaagctgaccgtggacaagtcccggtggcagcagggcaacgtgttcagctgcagcgtgatgcacgaggccctgcacaaccactacacccagaagagcctgagcctgagccccggatagtaa

SEQ ID NO: 37 - protein, 477 aa, Artificial Sequence
  IgG1 heavy chain
MDPKGSLSWRILLFLSLAFELSYGQVQLVQSGAEVKKPGASVKVSCKASGGTFSSYAISWVRQAPGQGLEWMGWISPDNGNTNYAQKLQGRVTMTRDTSTSTVYMELSSLRSEDTAVYYCARLAYDTGYYYYYYMDVWGKGTTVTVSSASTKGPSVFPLAPSSKSTSGGTAALGCLVKDYFPEPVTVSWNSGALTSGVHTFPAVLQSSGLYSLSSVVTVPSSSLGTQTYICNVNHKPSNTKVDKKVEPKSCDKTHTCPPCPAPELLGGPSVFLFPPKPKDTLMISRTPEVTCVVVDVSHEDPEVKFNWYVDGVEVHNAKTKPREEQYNSTYRVVSVLTVLHQDWLNGKEYKCKVSNKALPAPIEKTISKAKGQPREPQVYTLPPSREEMTKNQVSLTCLVKGFYPSDIAVEWESNGQPENNYKTTPPVLDSDGSFFLYSKLTVDKSRWQQGNVFSCSVMHEALHNHYTQKSLSLSPG

SEQ ID NO: 38 - DNA, 1431 bp, Artificial Sequence
  IgG1 heavy chain
atggaccccaagggcagcctgagctggagaatcctgctgttcctgagcctggccttcgagctgagctacggcgaggtgcagctcctggagagcggcggtggtctggtacagcccggaggcagcttgaggctgagctgtgccgccagcggattcgccttcagcagccactggatgcactgggtgaggcaagcaccaggtaagggcctggagtgggttgccaccatctctagcggaagccacagcatccactacgcagacagcgtgaagggcaggttcaccatcagcagggacaacagcaagaacaccctgtacctgcagatgaacagcctgagggccgaggataccgccgtctactactgcgccagggaggccggcaccagctattactactacggcatggacgtgtggggcaagggaaccaccgtgaccgtgagcagcgccagcaccaagggccccagcgtgttccctctggcccccagcagcaagagcaccagcggcggaaccgccgccctgggctgcctggtgaaggactacttccccgagcccgtgaccgtgtcctggaacagcggcgctctgaccagcggagtgcacaccttccctgccgtgctgcagagcagcggcctgtactccctgagcagcgtggtgaccgtgcccagcagcagcctgggcacccagacctacatctgcaacgtgaaccacaagccctccaacaccaaggtggacaagaaggtggagcctaagagctgcgacaagacccacacctgccctccctgccccgcccccgagctgctgggcggacccagcgtgttcctgttccctcccaagcccaaggacaccctgatgatcagccgcacccccgaggtgacctgcgtggtggtggacgtgagccacgaggaccccgaggtgaagttcaactggtacgtggacggcgtggaggtgcacaacgccaagaccaagcctcgggaggagcagtacaactccacctaccgcgtggtgagcgtgctgaccgtgctgcaccaggactggctgaacggcaaggagtacaagtgcaaggtgagcaacaaggccctgcccgctcccatcgagaagaccatcagcaaggccaagggccagccccgggagcctcaggtgtacaccctgccccccagccgcgaagagatgaccaagaaccaggtgagcctgacctgcctggtgaagggcttctacccctccgacatcgccgtggagtgggagagcaacggccagcctgagaacaactacaagaccacccctcccgtgctggacagcgacggcagcttcttcctgtacagcaagctgaccgtggacaagtcccggtggcagcagggcaacgtgttcagctgcagcgtgatgcacgaggccctgcacaaccactacacccagaagagcctgagcctgagccccggatagtaa

SEQ ID NO: 39 - protein, 475 aa, Artificial Sequence
  IgG1 heavy chain
MDPKGSLSWRILLFLSLAFELSYGEVQLLESGGGLVQPGGSLRLSCAASGFAFSSHWMHWVRQAPGKGLEWVATISSGSHSIHYADSVKGRFTISRDNSKNTLYLQMNSLRAEDTAVYYCAREAGTSYYYYGMDVWGKGTTVTVSSASTKGPSVFPLAPSSKSTSGGTAALGCLVKDYFPEPVTVSWNSGALTSGVHTFPAVLQSSGLYSLSSVVTVPSSSLGTQTYICNVNHKPSNTKVDKKVEPKSCDKTHTCPPCPAPELLGGPSVFLFPPKPKDTLMISRTPEVTCVVVDVSHEDPEVKFNWYVDGVEVHNAKTKPREEQYNSTYRVVSVLTVLHQDWLNGKEYKCKVSNKALPAPIEKTISKAKGQPREPQVYTLPPSREEMTKNQVSLTCLVKGFYPSDIAVEWESNGQPENNYKTTPPVLDSDGSFFLYSKLTVDKSRWQQGNVFSCSVMHEALHNHYTQKSLSLSPG

SEQ ID NO: 40 - DNA, 1428 bp, Artificial Sequence
  IgG1 heavy chain
atggaccccaagggcagcctgagctggagaatcctgctgttcctgagcctggccttcgagctgagctacggccaggtgcagttggtgcagagcggagcggaagtgaagaagcccggcagcagcgtgaaggtgagctgcaaggccagcggcggtaccttcggctactacgccatcagctgggtgaggcaggccccaggccagggcctggagtggatgggcggcatcatccccatggtgggcaccggccagtacgcccaggagttccagggcagggtgaccatcactgccgacgaaagcaccagcaccgcatacatggagctgagcagtctgaggagcgaggacaccgccgtgtactactgcgctggcgtggaggtgggcgcgacacggggctacttccagcactggggacagggcaccctcgtgaccgtgagcagcgccagcaccaagggccccagcgtgttccctctggcccccagcagcaagagcaccagcggcggaaccgccgccctgggctgcctggtgaaggactacttccccgagcccgtgaccgtgtcctggaacagcggcgctctgaccagcggagtgcacaccttccctgccgtgctgcagagcagcggcctgtactccctgagcagcgtggtgaccgtgcccagcagcagcctgggcacccagacctacatctgcaacgtgaaccacaagccctccaacaccaaggtggacaagaaggtggagcctaagagctgcgacaagacccacacctgccctccctgccccgcccccgagctgctgggcggacccagcgtgttcctgttccctcccaagcccaaggacaccctgatgatcagccgcacccccgaggtgacctgcgtggtggtggacgtgagccacgaggaccccgaggtgaagttcaactggtacgtggacggcgtggaggtgcacaacgccaagaccaagcctcgggaggagcagtacaactccacctaccgcgtggtgagcgtgctgaccgtgctgcaccaggactggctgaacggcaaggagtacaagtgcaaggtgagcaacaaggccctgcccgctcccatcgagaagaccatcagcaaggccaagggccagccccgggagcctcaggtgtacaccctgccccccagccgcgaagagatgaccaagaaccaggtgagcctgacctgcctggtgaagggcttctacccctccgacatcgccgtggagtgggagagcaacggccagcctgagaacaactacaagaccacccctcccgtgctggacagcgacggcagcttcttcctgtacagcaagctgaccgtggacaagtcccggtggcagcagggcaacgtgttcagctgcagcgtgatgcacgaggccctgcacaaccactacacccagaagagcctgagcctgagccccggatagtaa

SEQ ID NO: 41 - protein, 474 aa, Artificial Sequence
  IgG1 heavy chain
MDPKGSLSWRILLFLSLAFELSYGQVQLVQSGAEVKKPGSSVKVSCKASGGTFGYYAISWVRQAPGQGLEWMGGIIPMVGTGQYAQEFQGRVTITADESTSTAYMELSSLRSEDTAVYYCAGVEVGATRGYFQHWGQGTLVTVSSASTKGPSVFPLAPSSKSTSGGTAALGCLVKDYFPEPVTVSWNSGALTSGVHTFPAVLQSSGLYSLSSVVTVPSSSLGTQTYICNVNHKPSNTKVDKKVEPKSCDKTHTCPPCPAPELLGGPSVFLFPPKPKDTLMISRTPEVTCVVVDVSHEDPEVKFNWYVDGVEVHNAKTKPREEQYNSTYRVVSVLTVLHQDWLNGKEYKCKVSNKALPAPIEKTISKAKGQPREPQVYTLPPSREEMTKNQVSLTCLVKGFYPSDIAVEWESNGQPENNYKTTPPVLDSDGSFFLYSKLTVDKSRWQQGNVFSCSVMHEALHNHYTQKSLSLSPG

SEQ ID NO: 42 - DNA, 1422 bp, Artificial Sequence
  IgG1 heavy chain
atggaccccaagggcagcctgagctggagaatcctgctgttcctgagcctggccttcgagctgagctacggccaggtgcagctcgtgcagagcggtgccgaggtgaagaagccgggagcctctgtgaaggttagctgcaaggccagcggcggtaccttcagcagctacgccatcagctgggtgaggcaggcacccggacagggcctggagtggatgggctggatcaaccccaactcaggcgggaccaattacgcccagaagttccaaggcagggtgaccatgaccagggacactagcaccagcaccgtgtacatggagcttagcagcctgaggagcgaggacaccgccgtgtattactgcgccatggataccaactactactatggcatggacgtgtggggccagggcacaaccgtgaccgtgagcagcgcaagcaccaagggccccagcgtgttccctctggcccccagcagcaagagcaccagcggcggaaccgccgccctgggctgcctggtgaaggactacttccccgagcccgtgaccgtgtcctggaacagcggcgctctgaccagcggagtgcacaccttccctgccgtgctgcagagcagcggcctgtactccctgagcagcgtggtgaccgtgcccagcagcagcctgggcacccagacctacatctgcaacgtgaaccacaagccctccaacaccaaggtggacaagaaggtggagcctaagagctgcgacaagacccacacctgccctccctgccccgcccccgagctgctgggcggacccagcgtgttcctgttccctcccaagcccaaggacaccctgatgatcagccgcacccccgaggtgacctgcgtggtggtggacgtgagccacgaggaccccgaggtgaagttcaactggtacgtggacggcgtggaggtgcacaacgccaagaccaagcctcgggaggagcagtacaactccacctaccgcgtggtgagcgtgctgaccgtgctgcaccaggactggctgaacggcaaggagtacaagtgcaaggtgagcaacaaggccctgcccgctcccatcgagaagaccatcagcaaggccaagggccagccccgggagcctcaggtgtacaccctgccccccagccgcgaagagatgaccaagaaccaggtgagcctgacctgcctggtgaagggcttctacccctccgacatcgccgtggagtgggagagcaacggccagcctgagaacaactacaagaccacccctcccgtgctggacagcgacggcagcttcttcctgtacagcaagctgaccgtggacaagtcccggtggcagcagggcaacgtgttcagctgcagcgtgatgcacgaggccctgcacaaccactacacccagaagagcctgagcctgagccccggatagtaa

SEQ ID NO: 43 - protein, 472 aa, Artificial Sequence
  IgG1 heavy chain
MDPKGSLSWRILLFLSLAFELSYGQVQLVQSGAEVKKPGASVKVSCKASGGTFSSYAISWVRQAPGQGLEWMGWINPNSGGTNYAQKFQGRVTMTRDTSTSTVYMELSSLRSEDTAVYYCAMDTNYYYGMDVWGQGTTVTVSSASTKGPSVFPLAPSSKSTSGGTAALGCLVKDYFPEPVTVSWNSGALTSGVHTFPAVLQSSGLYSLSSVVTVPSSSLGTQTYICNVNHKPSNTKVDKKVEPKSCDKTHTCPPCPAPELLGGPSVFLFPPKPKDTLMISRTPEVTCVVVDVSHEDPEVKFNWYVDGVEVHNAKTKPREEQYNSTYRVVSVLTVLHQDWLNGKEYKCKVSNKALPAPIEKTISKAKGQPREPQVYTLPPSREEMTKNQVSLTCLVKGFYPSDIAVEWESNGQPENNYKTTPPVLDSDGSFFLYSKLTVDKSRWQQGNVFSCSVMHEALHNHYTQKSLSLSPG

SEQ ID NO: 44 - DNA, 1446 bp, Artificial Sequence
  IgG1 heavy chain
atggaccccaagggcagcctgagctggagaatcctgctgttcctgagcctggccttcgagctgagctacggccaggtgcagctggttcagagcggtgccgaggtgaaaaagcccggtgccagcgtgaaggtgagctgcaaggccagcggttacactttcaccggctactacatgcactgggtgaggcaggcccctggacagggcctggagtggatgggcatcatcgaccccagcggcggaggcaccagctacgcccagaagttccagggcagggtaaccatgaccagggacacctctacgagcacagtgtacatggagctgagcagcctgaggagcgaggacaccgccgtgtactactgcgccaaggacatcgtggtagtgcctgccgccatcgccaactactattacggcatggacgtgtggggccaaggcacaaccgtgaccgtgagctctgccagcaccaagggccccagcgtgttccctctggcccccagcagcaagagcaccagcggcggaaccgccgccctgggctgcctggtgaaggactacttccccgagcccgtgaccgtgtcctggaacagcggcgctctgaccagcggagtgcacaccttccctgccgtgctgcagagcagcggcctgtactccctgagcagcgtggtgaccgtgcccagcagcagcctgggcacccagacctacatctgcaacgtgaaccacaagccctccaacaccaaggtggacaagaaggtggagcctaagagctgcgacaagacccacacctgccctccctgccccgcccccgagctgctgggcggacccagcgtgttcctgttccctcccaagcccaaggacaccctgatgatcagccgcacccccgaggtgacctgcgtggtggtggacgtgagccacgaggaccccgaggtgaagttcaactggtacgtggacggcgtggaggtgcacaacgccaagaccaagcctcgggaggagcagtacaactccacctaccgcgtggtgagcgtgctgaccgtgctgcaccaggactggctgaacggcaaggagtacaagtgcaaggtgagcaacaaggccctgcccgctcccatcgagaagaccatcagcaaggccaagggccagccccgggagcctcaggtgtacaccctgccccccagccgcgaagagatgaccaagaaccaggtgagcctgacctgcctggtgaagggcttctacccctccgacatcgccgtggagtgggagagcaacggccagcctgagaacaactacaagaccacccctcccgtgctggacagcgacggcagcttcttcctgtacagcaagctgaccgtggacaagtcccggtggcagcagggcaacgtgttcagctgcagcgtgatgcacgaggccctgcacaaccactacacccagaagagcctgagcctgagccccggatagtaa

SEQ ID NO: 45 - protein, 480 aa, Artificial Sequence
  IgG1 heavy chain
MDPKGSLSWRILLFLSLAFELSYGQVQLVQSGAEVKKPGASVKVSCKASGYTFTGYYMHWVRQAPGQGLEWMGIIDPSGGGTSYAQKFQGRVTMTRDTSTSTVYMELSSLRSEDTAVYYCAKDIVVVPAAIANYYYGMDVWGQGTTVTVSSASTKGPSVFPLAPSSKSTSGGTAALGCLVKDYFPEPVTVSWNSGALTSGVHTFPAVLQSSGLYSLSSVVTVPSSSLGTQTYICNVNHKPSNTKVDKKVEPKSCDKTHTCPPCPAPELLGGPSVFLFPPKPKDTLMISRTPEVTCVVVDVSHEDPEVKFNWYVDGVEVHNAKTKPREEQYNSTYRVVSVLTVLHQDWLNGKEYKCKVSNKALPAPIEKTISKAKGQPREPQVYTLPPSREEMTKNQVSLTCLVKGFYPSDIAVEWESNGQPENNYKTTPPVLDSDGSFFLYSKLTVDKSRWQQGNVFSCSVMHEALHNHYTQKSLSLSPG

SEQ ID NO: 46 - DNA, 1416 bp, Artificial Sequence
  IgG1 heavy chain
atggaccccaagggcagcctgagctggagaatcctgctgttcctgagcctggccttcgagctgagctacggccaggtgcagctggtgcagtctggtgctgaggtgaagaagcccggcagcagcgtaaaggtgagctgcaaggccagcggctacaccttcaccgattattacatgcactgggtgaggcaggcaccgggtcaaggcctggagtggatgggcggcatcatgcccctgtttggcaccatcaagtacgcccaggaactgcagggcagggtgaccatcacagccgacgagtcaaccagcaccgcgtacatggagctgagcagcctgaggagcgaggacaccgccgtgtactactgcgccaggggaagagtgggcgccaccgactactggggccagggcaccttggtgaccgtaagctctgccagcaccaagggccccagcgtgttccctctggcccccagcagcaagagcaccagcggcggaaccgccgccctgggctgcctggtgaaggactacttccccgagcccgtgaccgtgtcctggaacagcggcgctctgaccagcggagtgcacaccttccctgccgtgctgcagagcagcggcctgtactccctgagcagcgtggtgaccgtgcccagcagcagcctgggcacccagacctacatctgcaacgtgaaccacaagccctccaacaccaaggtggacaagaaggtggagcctaagagctgcgacaagacccacacctgccctccctgccccgcccccgagctgctgggcggacccagcgtgttcctgttccctcccaagcccaaggacaccctgatgatcagccgcacccccgaggtgacctgcgtggtggtggacgtgagccacgaggaccccgaggtgaagttcaactggtacgtggacggcgtggaggtgcacaacgccaagaccaagcctcgggaggagcagtacaactccacctaccgcgtggtgagcgtgctgaccgtgctgcaccaggactggctgaacggcaaggagtacaagtgcaaggtgagcaacaaggccctgcccgctcccatcgagaagaccatcagcaaggccaagggccagccccgggagcctcaggtgtacaccctgccccccagccgcgaagagatgaccaagaaccaggtgagcctgacctgcctggtgaagggcttctacccctccgacatcgccgtggagtgggagagcaacggccagcctgagaacaactacaagaccacccctcccgtgctggacagcgacggcagcttcttcctgtacagcaagctgaccgtggacaagtcccggtggcagcagggcaacgtgttcagctgcagcgtgatgcacgaggccctgcacaaccactacacccagaagagcctgagcctgagccccggatagtaa

SEQ ID NO: 47 - protein, 470 aa, Artificial Sequence
  IgG1 heavy chain
MDPKGSLSWRILLFLSLAFELSYGQVQLVQSGAEVKKPGSSVKVSCKASGYTFTDYYMHWVRQAPGQGLEWMGGIMPLFGTIKYAQELQGRVTITADESTSTAYMELSSLRSEDTAVYYCARGRVGATDYWGQGTLVTVSSASTKGPSVFPLAPSSKSTSGGTAALGCLVKDYFPEPVTVSWNSGALTSGVHTFPAVLQSSGLYSLSSVVTVPSSSLGTQTYICNVNHKPSNTKVDKKVEPKSCDKTHTCPPCPAPELLGGPSVFLFPPKPKDTLMISRTPEVTCVVVDVSHEDPEVKFNWYVDGVEVHNAKTKPREEQYNSTYRVVSVLTVLHQDWLNGKEYKCKVSNKALPAPIEKTISKAKGQPREPQVYTLPPSREEMTKNQVSLTCLVKGFYPSDIAVEWESNGQPENNYKTTPPVLDSDGSFFLYSKLTVDKSRWQQGNVFSCSVMHEALHNHYTQKSLSLSPG

SEQ ID NO: 48 - DNA, 1413 bp, Artificial Sequence
  IgG1 heavy chain
atggaccccaagggcagcctgagctggagaatcctgctgttcctgagcctggccttcgagctgagctacggccaggtgcagctggtacagtccggtgctgaggtgaagaagcccggcagcagcgtaaaggtgagctgcaaggccagcggctacaccttcaccagctacggaatcagctgggtgaggcaggcacccggacagggcctggagtggatgggcggcatcatccccatcttcggcaccgcaaactacgcccccaggttccagggcagggtgaccatcaccgccgatgaaagcaccagcactgcctacatggagctgagcagcctgaggagcgaggacactgctgtgtactactgcgccagggacacggtgtcaatggacgtgtggggccaaggcaccaccgtgaccgtgagctctgccagcaccaagggccccagcgtgttccctctggcccccagcagcaagagcaccagcggcggaaccgccgccctgggctgcctggtgaaggactacttccccgagcccgtgaccgtgtcctggaacagcggcgctctgaccagcggagtgcacaccttccctgccgtgctgcagagcagcggcctgtactccctgagcagcgtggtgaccgtgcccagcagcagcctgggcacccagacctacatctgcaacgtgaaccacaagccctccaacaccaaggtggacaagaaggtggagcctaagagctgcgacaagacccacacctgccctccctgccccgcccccgagctgctgggcggacccagcgtgttcctgttccctcccaagcccaaggacaccctgatgatcagccgcacccccgaggtgacctgcgtggtggtggacgtgagccacgaggaccccgaggtgaagttcaactggtacgtggacggcgtggaggtgcacaacgccaagaccaagcctcgggaggagcagtacaactccacctaccgcgtggtgagcgtgctgaccgtgctgcaccaggactggctgaacggcaaggagtacaagtgcaaggtgagcaacaaggccctgcccgctcccatcgagaagaccatcagcaaggccaagggccagccccgggagcctcaggtgtacaccctgccccccagccgcgaagagatgaccaagaaccaggtgagcctgacctgcctggtgaagggcttctacccctccgacatcgccgtggagtgggagagcaacggccagcctgagaacaactacaagaccacccctcccgtgctggacagcgacggcagcttcttcctgtacagcaagctgaccgtggacaagtcccggtggcagcagggcaacgtgttcagctgcagcgtgatgcacgaggccctgcacaaccactacacccagaagagcctgagcctgagccccggatagtaa

SEQ ID NO: 49 - protein, 469 aa, Artificial Sequence
  IgG1 heavy chain
MDPKGSLSWRILLFLSLAFELSYGQVQLVQSGAEVKKPGSSVKVSCKASGYTFTSYGISWVRQAPGQGLEWMGGIIPIFGTANYAPRFQGRVTITADESTSTAYMELSSLRSEDTAVYYCARDTVSMDVWGQGTTVTVSSASTKGPSVFPLAPSSKSTSGGTAALGCLVKDYFPEPVTVSWNSGALTSGVHTFPAVLQSSGLYSLSSVVTVPSSSLGTQTYICNVNHKPSNTKVDKKVEPKSCDKTHTCPPCPAPELLGGPSVFLFPPKPKDTLMISRTPEVTCVVVDVSHEDPEVKFNWYVDGVEVHNAKTKPREEQYNSTYRVVSVLTVLHQDWLNGKEYKCKVSNKALPAPIEKTISKAKGQPREPQVYTLPPSREEMTKNQVSLTCLVKGFYPSDIAVEWESNGQPENNYKTTPPVLDSDGSFFLYSKLTVDKSRWQQGNVFSCSVMHEALHNHYTQKSLSLSPG

SEQ ID NO: 50 - DNA, 1428 bp, Artificial Sequence
  IgG1 heavy chain
atggaccccaagggcagcctgagctggagaatcctgctgttcctgagcctggccttcgagctgagctacggccaggtgcagctggtgcagagcggtgcggaggtgaagaagcctggcagcagcgtaaaggtgagctgcaaggccagcggtggcaccttcagcagctacgccattagctgggtgaggcaggcacctggtcagggcctggagtggatgggcggcatcatccccatgttcggcaccaccaactacgcccagaagttccagggcagggtgaccatcaccgccgacgagagcacctctactgcctacatggagctgagcagcctgaggagcgaggataccgccgtgtactactgcgccaccgtggccgctgccggtcctaactggtacttcgacctgtggggaagggggaccctggtgaccgtgagctctgccagcaccaagggccccagcgtgttccctctggcccccagcagcaagagcaccagcggcggaaccgccgccctgggctgcctggtgaaggactacttccccgagcccgtgaccgtgtcctggaacagcggcgctctgaccagcggagtgcacaccttccctgccgtgctgcagagcagcggcctgtactccctgagcagcgtggtgaccgtgcccagcagcagcctgggcacccagacctacatctgcaacgtgaaccacaagccctccaacaccaaggtggacaagaaggtggagcctaagagctgcgacaagacccacacctgccctccctgccccgcccccgagctgctgggcggacccagcgtgttcctgttccctcccaagcccaaggacaccctgatgatcagccgcacccccgaggtgacctgcgtggtggtggacgtgagccacgaggaccccgaggtgaagttcaactggtacgtggacggcgtggaggtgcacaacgccaagaccaagcctcgggaggagcagtacaactccacctaccgcgtggtgagcgtgctgaccgtgctgcaccaggactggctgaacggcaaggagtacaagtgcaaggtgagcaacaaggccctgcccgctcccatcgagaagaccatcagcaaggccaagggccagccccgggagcctcaggtgtacaccctgccccccagccgcgaagagatgaccaagaaccaggtgagcctgacctgcctggtgaagggcttctacccctccgacatcgccgtggagtgggagagcaacggccagcctgagaacaactacaagaccacccctcccgtgctggacagcgacggcagcttcttcctgtacagcaagctgaccgtggacaagtcccggtggcagcagggcaacgtgttcagctgcagcgtgatgcacgaggccctgcacaaccactacacccagaagagcctgagcctgagccccggatagtaa

SEQ ID NO: 51 - protein, 474 aa, Artificial Sequence
  IgG1 heavy chain
MDPKGSLSWRILLFLSLAFELSYGQVQLVQSGAEVKKPGSSVKVSCKASGGTFSSYAISWVRQAPGQGLEWMGGIIPMFGTTNYAQKFQGRVTITADESTSTAYMELSSLRSEDTAVYYCATVAAAGPNWYFDLWGRGTLVTVSSASTKGPSVFPLAPSSKSTSGGTAALGCLVKDYFPEPVTVSWNSGALTSGVHTFPAVLQSSGLYSLSSVVTVPSSSLGTQTYICNVNHKPSNTKVDKKVEPKSCDKTHTCPPCPAPELLGGPSVFLFPPKPKDTLMISRTPEVTCVVVDVSHEDPEVKFNWYVDGVEVHNAKTKPREEQYNSTYRVVSVLTVLHQDWLNGKEYKCKVSNKALPAPIEKTISKAKGQPREPQVYTLPPSREEMTKNQVSLTCLVKGFYPSDIAVEWESNGQPENNYKTTPPVLDSDGSFFLYSKLTVDKSRWQQGNVFSCSVMHEALHNHYTQKSLSLSPG

SEQ ID NO: 52 - DNA, 1449 bp, Artificial Sequence
  IgG1 heavy chain
atggaccccaagggcagcctgagctggagaatcctgctgttcctgagcctggccttcgagctgagctacggccaggtgcagttggtgcaaagcggtgccgaggtgaagaaacccggagcgagcgtgaaagtgagctgcaaggccagcggctacaccttcaccagccactacatgcactgggtgaggcaggcaccgggccaaggcctggagtggatgggcatcatcaacccttcaggcggcagcacctcctacgcccagaagttccagggcagggtgaccatgaccagggacacctctaccagcaccgtgtacatggagctgagcagcctgaggtctgaggacaccgccgtctactactgcgccagggccggaatcggctaccttgccgcccacgacctgtactattactacggcatggacgtgtgggggaggggaaccctggtgaccgtgagctctgccagcaccaagggccccagcgtgttccctctggcccccagcagcaagagcaccagcggcggaaccgccgccctgggctgcctggtgaaggactacttccccgagcccgtgaccgtgtcctggaacagcggcgctctgaccagcggagtgcacaccttccctgccgtgctgcagagcagcggcctgtactccctgagcagcgtggtgaccgtgcccagcagcagcctgggcacccagacctacatctgcaacgtgaaccacaagccctccaacaccaaggtggacaagaaggtggagcctaagagctgcgacaagacccacacctgccctccctgccccgcccccgagctgctgggcggacccagcgtgttcctgttccctcccaagcccaaggacaccctgatgatcagccgcacccccgaggtgacctgcgtggtggtggacgtgagccacgaggaccccgaggtgaagttcaactggtacgtggacggcgtggaggtgcacaacgccaagaccaagcctcgggaggagcagtacaactccacctaccgcgtggtgagcgtgctgaccgtgctgcaccaggactggctgaacggcaaggagtacaagtgcaaggtgagcaacaaggccctgcccgctcccatcgagaagaccatcagcaaggccaagggccagccccgggagcctcaggtgtacaccctgccccccagccgcgaagagatgaccaagaaccaggtgagcctgacctgcctggtgaagggcttctacccctccgacatcgccgtggagtgggagagcaacggccagcctgagaacaactacaagaccacccctcccgtgctggacagcgacggcagcttcttcctgtacagcaagctgaccgtggacaagtcccggtggcagcagggcaacgtgttcagctgcagcgtgatgcacgaggccctgcacaaccactacacccagaagagcctgagcctgagccccggatagtaa

SEQ ID NO: 53 - protein, 481 aa, Artificial Sequence
  IgG1 heavy chain
MDPKGSLSWRILLFLSLAFELSYGQVQLVQSGAEVKKPGASVKVSCKASGYTFTSHYMHWVRQAPGQGLEWMGIINPSGGSTSYAQKFQGRVTMTRDTSTSTVYMELSSLRSEDTAVYYCARAGIGYLAAHDLYYYYGMDVWGRGTLVTVSSASTKGPSVFPLAPSSKSTSGGTAALGCLVKDYFPEPVTVSWNSGALTSGVHTFPAVLQSSGLYSLSSVVTVPSSSLGTQTYICNVNHKPSNTKVDKKVEPKSCDKTHTCPPCPAPELLGGPSVFLFPPKPKDTLMISRTPEVTCVVVDVSHEDPEVKFNWYVDGVEVHNAKTKPREEQYNSTYRVVSVLTVLHQDWLNGKEYKCKVSNKALPAPIEKTISKAKGQPREPQVYTLPPSREEMTKNQVSLTCLVKGFYPSDIAVEWESNGQPENNYKTTPPVLDSDGSFFLYSKLTVDKSRWQQGNVFSCSVMHEALHNHYTQKSLSLSPG

SEQ ID NO: 54 - DNA, 1419 bp, Artificial Sequence
  IgG1 heavy chain
atggaccccaagggcagcctgagctggagaatcctgctgttcctgagcctggccttcgagctgagctacggccaggtgcagctggtgcagagcggggcagaggtgaagaagcctggcgcgtctgtgaaggtgagctgcaaggccagcggctacacgttcaccgacagcttcatgttctgggtgaggcaggcacccggccagggcctggagtgggtgggcctgatcaaccccggcaccggagccaccatcttcgcccagaagttccagggcagggtgaccatgacccgcgacacctctacgagcaccgtttacatggagctgagcagcctgaggagcgaggacaccgccgtgtactactgcgcccgatcctcagactacgacagcagcgactattggggccaaggcactctggtgaccgtgagctccgcaagcaccaagggccccagcgtgttccctctggcccccagcagcaagagcaccagcggcggaaccgccgccctgggctgcctggtgaaggactacttccccgagcccgtgaccgtgtcctggaacagcggcgctctgaccagcggagtgcacaccttccctgccgtgctgcagagcagcggcctgtactccctgagcagcgtggtgaccgtgcccagcagcagcctgggcacccagacctacatctgcaacgtgaaccacaagccctccaacaccaaggtggacaagaaggtggagcctaagagctgcgacaagacccacacctgccctccctgccccgcccccgagctgctgggcggacccagcgtgttcctgttccctcccaagcccaaggacaccctgatgatcagccgcacccccgaggtgacctgcgtggtggtggacgtgagccacgaggaccccgaggtgaagttcaactggtacgtggacggcgtggaggtgcacaacgccaagaccaagcctcgggaggagcagtacaactccacctaccgcgtggtgagcgtgctgaccgtgctgcaccaggactggctgaacggcaaggagtacaagtgcaaggtgagcaacaaggccctgcccgctcccatcgagaagaccatcagcaaggccaagggccagccccgggagcctcaggtgtacaccctgccccccagccgcgaagagatgaccaagaaccaggtgagcctgacctgcctggtgaagggcttctacccctccgacatcgccgtggagtgggagagcaacggccagcctgagaacaactacaagaccacccctcccgtgctggacagcgacggcagcttcttcctgtacagcaagctgaccgtggacaagtcccggtggcagcagggcaacgtgttcagctgcagcgtgatgcacgaggccctgcacaaccactacacccagaagagcctgagcctgagccccggatagtaa

SEQ ID NO: 55 - protein, 471 aa, Artificial Sequence
  IgG1 heavy chain
MDPKGSLSWRILLFLSLAFELSYGQVQLVQSGAEVKKPGASVKVSCKASGYTFTDSFMFWVRQAPGQGLEWVGLINPGTGATIFAQKFQGRVTMTRDTSTSTVYMELSSLRSEDTAVYYCARSSDYDSSDYWGQGTLVTVSSASTKGPSVFPLAPSSKSTSGGTAALGCLVKDYFPEPVTVSWNSGALTSGVHTFPAVLQSSGLYSLSSVVTVPSSSLGTQTYICNVNHKPSNTKVDKKVEPKSCDKTHTCPPCPAPELLGGPSVFLFPPKPKDTLMISRTPEVTCVVVDVSHEDPEVKFNWYVDGVEVHNAKTKPREEQYNSTYRVVSVLTVLHQDWLNGKEYKCKVSNKALPAPIEKTISKAKGQPREPQVYTLPPSREEMTKNQVSLTCLVKGFYPSDIAVEWESNGQPENNYKTTPPVLDSDGSFFLYSKLTVDKSRWQQGNVFSCSVMHEALHNHYTQKSLSLSPG

SEQ ID NO: 56 - DNA, 1434 bp, Artificial Sequence
  IgG1 heavy chain
atggaccccaagggcagcctgagctggagaatcctgctgttcctgagcctggccttcgagctgagctacggccaggtgcagctggtgcagagcggggcagaggtgaagaagcccggcagccaagtgaaggtgagctgcaaggccagcggctacactttcaccagtttcggtatcagctgggtgaggcaggccccaggccagggcctggagtggctgggcggcatcatccccaccctgggcaccgccaactacgcccagaagttccagggcagggtgaccatcactgccgacgacagcacgagcaccgcatacatggagctgagcagcctgaggagcgaggacaccgccgtgtactattgcgcaggcggagccgcagcaggacctgacaagtattacggcatggacgtgtggggccaaggcaccaccgtgaccgtgagctctgccagcaccaagggccccagcgtgttccctctggcccccagcagcaagagcaccagcggcggaaccgccgccctgggctgcctggtgaaggactacttccccgagcccgtgaccgtgtcctggaacagcggcgctctgaccagcggagtgcacaccttccctgccgtgctgcagagcagcggcctgtactccctgagcagcgtggtgaccgtgcccagcagcagcctgggcacccagacctacatctgcaacgtgaaccacaagccctccaacaccaaggtggacaagaaggtggagcctaagagctgcgacaagacccacacctgccctccctgccccgcccccgagctgctgggcggacccagcgtgttcctgttccctcccaagcccaaggacaccctgatgatcagccgcacccccgaggtgacctgcgtggtggtggacgtgagccacgaggaccccgaggtgaagttcaactggtacgtggacggcgtggaggtgcacaacgccaagaccaagcctcgggaggagcagtacaactccacctaccgcgtggtgagcgtgctgaccgtgctgcaccaggactggctgaacggcaaggagtacaagtgcaaggtgagcaacaaggccctgcccgctcccatcgagaagaccatcagcaaggccaagggccagccccgggagcctcaggtgtacaccctgccccccagccgcgaagagatgaccaagaaccaggtgagcctgacctgcctggtgaagggcttctacccctccgacatcgccgtggagtgggagagcaacggccagcctgagaacaactacaagaccacccctcccgtgctggacagcgacggcagcttcttcctgtacagcaagctgaccgtggacaagtcccggtggcagcagggcaacgtgttcagctgcagcgtgatgcacgaggccctgcacaaccactacacccagaagagcctgagcctgagccccggatagtaa

SEQ ID NO: 57 - protein, 476 aa, Artificial Sequence
  IgG1 heavy chain
MDPKGSLSWRILLFLSLAFELSYGQVQLVQSGAEVKKPGSQVKVSCKASGYTFTSFGISWVRQAPGQGLEWLGGIIPTLGTANYAQKFQGRVTITADDSTSTAYMELSSLRSEDTAVYYCAGGAAAGPDKYYGMDVWGQGTTVTVSSASTKGPSVFPLAPSSKSTSGGTAALGCLVKDYFPEPVTVSWNSGALTSGVHTFPAVLQSSGLYSLSSVVTVPSSSLGTQTYICNVNHKPSNTKVDKKVEPKSCDKTHTCPPCPAPELLGGPSVFLFPPKPKDTLMISRTPEVTCVVVDVSHEDPEVKFNWYVDGVEVHNAKTKPREEQYNSTYRVVSVLTVLHQDWLNGKEYKCKVSNKALPAPIEKTISKAKGQPREPQVYTLPPSREEMTKNQVSLTCLVKGFYPSDIAVEWESNGQPENNYKTTPPVLDSDGSFFLYSKLTVDKSRWQQGNVFSCSVMHEALHNHYTQKSLSLSPG

SEQ ID NO: 58 - DNA, 1416 bp, Artificial Sequence
  IgG1 heavy chain
atggaccccaagggcagcctgagctggagaatcctgctgttcctgagcctggccttcgagctgagctacggcgaggtccagctgctggagagcggcggaggactggtgcagccaggcggttctctgcgactgagctgcgcggcaagcggattcagcttcagccacgcctggatgagctgggtgaggcaggcacccggcaagggcctggagtgggttagcgtgatccacagtggcggcagcaccttctacgccgacagcgtgaagggcaggttcaccatcagcagggacaacagcaagaacaccctgtacctgcagatgaacagcctgagggccgaggacaccgccgtgtactactgcgccaggatcggaaagggagggggattcgattattggggccagggcaccctggtgaccgtgagcagcgccagcaccaagggccccagcgtgttccctctggcccccagcagcaagagcaccagcggcggaaccgccgccctgggctgcctggtgaaggactacttccccgagcccgtgaccgtgtcctggaacagcggcgctctgaccagcggagtgcacaccttccctgccgtgctgcagagcagcggcctgtactccctgagcagcgtggtgaccgtgcccagcagcagcctgggcacccagacctacatctgcaacgtgaaccacaagccctccaacaccaaggtggacaagaaggtggagcctaagagctgcgacaagacccacacctgccctccctgccccgcccccgagctgctgggcggacccagcgtgttcctgttccctcccaagcccaaggacaccctgatgatcagccgcacccccgaggtgacctgcgtggtggtggacgtgagccacgaggaccccgaggtgaagttcaactggtacgtggacggcgtggaggtgcacaacgccaagaccaagcctcgggaggagcagtacaactccacctaccgcgtggtgagcgtgctgaccgtgctgcaccaggactggctgaacggcaaggagtacaagtgcaaggtgagcaacaaggccctgcccgctcccatcgagaagaccatcagcaaggccaagggccagccccgggagcctcaggtgtacaccctgccccccagccgcgaagagatgaccaagaaccaggtgagcctgacctgcctggtgaagggcttctacccctccgacatcgccgtggagtgggagagcaacggccagcctgagaacaactacaagaccacccctcccgtgctggacagcgacggcagcttcttcctgtacagcaagctgaccgtggacaagtcccggtggcagcagggcaacgtgttcagctgcagcgtgatgcacgaggccctgcacaaccactacacccagaagagcctgagcctgagccccggatagtaa

SEQ ID NO: 59 - protein, 470 aa, Artificial Sequence
  IgG1 heavy chain
MDPKGSLSWRILLFLSLAFELSYGEVQLLESGGGLVQPGGSLRLSCAASGFSFSHAWMSWVRQAPGKGLEWVSVIHSGGSTFYADSVKGRFTISRDNSKNTLYLQMNSLRAEDTAVYYCARIGKGGGFDYWGQGTLVTVSSASTKGPSVFPLAPSSKSTSGGTAALGCLVKDYFPEPVTVSWNSGALTSGVHTFPAVLQSSGLYSLSSVVTVPSSSLGTQTYICNVNHKPSNTKVDKKVEPKSCDKTHTCPPCPAPELLGGPSVFLFPPKPKDTLMISRTPEVTCVVVDVSHEDPEVKFNWYVDGVEVHNAKTKPREEQYNSTYRVVSVLTVLHQDWLNGKEYKCKVSNKALPAPIEKTISKAKGQPREPQVYTLPPSREEMTKNQVSLTCLVKGFYPSDIAVEWESNGQPENNYKTTPPVLDSDGSFFLYSKLTVDKSRWQQGNVFSCSVMHEALHNHYTQKSLSLSPG

SEQ ID NO: 60 - DNA, 1437 bp, Artificial Sequence
  IgG1 heavy chain
atggaccccaagggcagcctgagctggagaatcctgctgttcctgagcctggccttcgagctgagctacggcgaggtgcaactgctggagagcggcgcagaagtgaagaagcccggcagcagcgtgaaggtgagctgcaaggccagtggcggcacctttagctcctacgccatcagctgggtgaggcaggcacccggacaaggcctggagtggatgggcggcatcatccccatcttcggcaccgctaactacgcccagaagttccagggcagggtgaccatcaccgccgacgagagcactagtaccgcctatatggagctgagcagcctgaggagcgaggataccgccgtgtactactgcgccagcggcttctacagcaacgacctgtactattactactacatggacgtgtggggcaagggcaccaccgtgaccgtgagctctgccagcaccaagggccccagcgtgttccctctggcccccagcagcaagagcaccagcggcggaaccgccgccctgggctgcctggtgaaggactacttccccgagcccgtgaccgtgtcctggaacagcggcgctctgaccagcggagtgcacaccttccctgccgtgctgcagagcagcggcctgtactccctgagcagcgtggtgaccgtgcccagcagcagcctgggcacccagacctacatctgcaacgtgaaccacaagccctccaacaccaaggtggacaagaaggtggagcctaagagctgcgacaagacccacacctgccctccctgccccgcccccgagctgctgggcggacccagcgtgttcctgttccctcccaagcccaaggacaccctgatgatcagccgcacccccgaggtgacctgcgtggtggtggacgtgagccacgaggaccccgaggtgaagttcaactggtacgtggacggcgtggaggtgcacaacgccaagaccaagcctcgggaggagcagtacaactccacctaccgcgtggtgagcgtgctgaccgtgctgcaccaggactggctgaacggcaaggagtacaagtgcaaggtgagcaacaaggccctgcccgctcccatcgagaagaccatcagcaaggccaagggccagccccgggagcctcaggtgtacaccctgccccccagccgcgaagagatgaccaagaaccaggtgagcctgacctgcctggtgaagggcttctacccctccgacatcgccgtggagtgggagagcaacggccagcctgagaacaactacaagaccacccctcccgtgctggacagcgacggcagcttcttcctgtacagcaagctgaccgtggacaagtcccggtggcagcagggcaacgtgttcagctgcagcgtgatgcacgaggccctgcacaaccactacacccagaagagcctgagcctgagccccggatagtaa

SEQ ID NO: 61 - protein, 477 aa, Artificial Sequence
  IgG1 heavy chain
MDPKGSLSWRILLFLSLAFELSYGEVQLLESGAEVKKPGSSVKVSCKASGGTFSSYAISWVRQAPGQGLEWMGGIIPIFGTANYAQKFQGRVTITADESTSTAYMELSSLRSEDTAVYYCASGFYSNDLYYYYYMDVWGKGTTVTVSSASTKGPSVFPLAPSSKSTSGGTAALGCLVKDYFPEPVTVSWNSGALTSGVHTFPAVLQSSGLYSLSSVVTVPSSSLGTQTYICNVNHKPSNTKVDKKVEPKSCDKTHTCPPCPAPELLGGPSVFLFPPKPKDTLMISRTPEVTCVVVDVSHEDPEVKFNWYVDGVEVHNAKTKPREEQYNSTYRVVSVLTVLHQDWLNGKEYKCKVSNKALPAPIEKTISKAKGQPREPQVYTLPPSREEMTKNQVSLTCLVKGFYPSDIAVEWESNGQPENNYKTTPPVLDSDGSFFLYSKLTVDKSRWQQGNVFSCSVMHEALHNHYTQKSLSLSPG

SEQ ID NO: 62 - DNA, 1419 bp, Artificial Sequence
  IgG1 heavy chain
atggaccccaagggcagcctgagctggagaatcctgctgttcctgagcctggccttcgagctgagctacggccaggtgcagctggtgcagagcggcgctgaggtgaagaagcccggagccagcgtgaaagtgagctgcaaggcctcaggctacaccttcagcaaccactacatgcactgggtgaggcaggccccaggccagggcctggagtggatgggctgggtcaaccccaccagcggcaacaccggatacgcccagaagttccagggcagggtgaccatgacccgggacaccagtacctccaccgtgtatatggagctgagcagcttgaggagcgaggacaccgccgtgtactactgcgccagggacctgggggtgacgtatttcgacctgtggggaaggggcaccctggtgaccgtgagctctgccagcaccaagggccccagcgtgttccctctggcccccagcagcaagagcaccagcggcggaaccgccgccctgggctgcctggtgaaggactacttccccgagcccgtgaccgtgtcctggaacagcggcgctctgaccagcggagtgcacaccttccctgccgtgctgcagagcagcggcctgtactccctgagcagcgtggtgaccgtgcccagcagcagcctgggcacccagacctacatctgcaacgtgaaccacaagccctccaacaccaaggtggacaagaaggtggagcctaagagctgcgacaagacccacacctgccctccctgccccgcccccgagctgctgggcggacccagcgtgttcctgttccctcccaagcccaaggacaccctgatgatcagccgcacccccgaggtgacctgcgtggtggtggacgtgagccacgaggaccccgaggtgaagttcaactggtacgtggacggcgtggaggtgcacaacgccaagaccaagcctcgggaggagcagtacaactccacctaccgcgtggtgagcgtgctgaccgtgctgcaccaggactggctgaacggcaaggagtacaagtgcaaggtgagcaacaaggccctgcccgctcccatcgagaagaccatcagcaaggccaagggccagccccgggagcctcaggtgtacaccctgccccccagccgcgaagagatgaccaagaaccaggtgagcctgacctgcctggtgaagggcttctacccctccgacatcgccgtggagtgggagagcaacggccagcctgagaacaactacaagaccacccctcccgtgctggacagcgacggcagcttcttcctgtacagcaagctgaccgtggacaagtcccggtggcagcagggcaacgtgttcagctgcagcgtgatgcacgaggccctgcacaaccactacacccagaagagcctgagcctgagccccggatagtaa

SEQ ID NO: 63 - protein, 471 aa, Artificial Sequence
  IgG1 heavy chain
MDPKGSLSWRILLFLSLAFELSYGQVQLVQSGAEVKKPGASVKVSCKASGYTFSNHYMHWVRQAPGQGLEWMGWVNPTSGNTGYAQKFQGRVTMTRDTSTSTVYMELSSLRSEDTAVYYCARDLGVTYFDLWGRGTLVTVSSASTKGPSVFPLAPSSKSTSGGTAALGCLVKDYFPEPVTVSWNSGALTSGVHTFPAVLQSSGLYSLSSVVTVPSSSLGTQTYICNVNHKPSNTKVDKKVEPKSCDKTHTCPPCPAPELLGGPSVFLFPPKPKDTLMISRTPEVTCVVVDVSHEDPEVKFNWYVDGVEVHNAKTKPREEQYNSTYRVVSVLTVLHQDWLNGKEYKCKVSNKALPAPIEKTISKAKGQPREPQVYTLPPSREEMTKNQVSLTCLVKGFYPSDIAVEWESNGQPENNYKTTPPVLDSDGSFFLYSKLTVDKSRWQQGNVFSCSVMHEALHNHYTQKSLSLSPG

SEQ ID NO: 64 - DNA, 1428 bp, Artificial Sequence
  IgG1 heavy chain
atggaccccaagggcagcctgagctggagaatcctgctgttcctgagcctggccttcgagctgagctacggcgaggtgcaactgctggagagcggcggtggcctggtgcagcccggtggcagcctgcggctgagctgcgctgcaagcggcttcaagttcaggaccttctggatgaactgggttaggcaggcacccggcaagggcctggagtgggtgagcgtgatcagcaacggcggagacgccacccattatgccgacagcgtgaagggcaggttcaccatcagcagggacaacagcaagaataccctgtacctgcagatgaacagcctcagggccgaggacaccgctgtgtactactgcgccagggtggactgctccggcggtagctgctatctgggctactggggccagggaaccttggtgacagtcagcagcgccagcaccaagggccccagcgtgttccctctggcccccagcagcaagagcaccagcggcggaaccgccgccctgggctgcctggtgaaggactacttccccgagcccgtgaccgtgtcctggaacagcggcgctctgaccagcggagtgcacaccttccctgccgtgctgcagagcagcggcctgtactccctgagcagcgtggtgaccgtgcccagcagcagcctgggcacccagacctacatctgcaacgtgaaccacaagccctccaacaccaaggtggacaagaaggtggagcctaagagctgcgacaagacccacacctgccctccctgccccgcccccgagctgctgggcggacccagcgtgttcctgttccctcccaagcccaaggacaccctgatgatcagccgcacccccgaggtgacctgcgtggtggtggacgtgagccacgaggaccccgaggtgaagttcaactggtacgtggacggcgtggaggtgcacaacgccaagaccaagcctcgggaggagcagtacaactccacctaccgcgtggtgagcgtgctgaccgtgctgcaccaggactggctgaacggcaaggagtacaagtgcaaggtgagcaacaaggccctgcccgctcccatcgagaagaccatcagcaaggccaagggccagccccgggagcctcaggtgtacaccctgccccccagccgcgaagagatgaccaagaaccaggtgagcctgacctgcctggtgaagggcttctacccctccgacatcgccgtggagtgggagagcaacggccagcctgagaacaactacaagaccacccctcccgtgctggacagcgacggcagcttcttcctgtacagcaagctgaccgtggacaagtcccggtggcagcagggcaacgtgttcagctgcagcgtgatgcacgaggccctgcacaaccactacacccagaagagcctgagcctgagccccggatagtaa

SEQ ID NO: 65 - protein, 474 aa, Artificial Sequence
  IgG1 heavy chain
MDPKGSLSWRILLFLSLAFELSYGEVQLLESGGGLVQPGGSLRLSCAASGFKFRTFWMNWVRQAPGKGLEWVSVISNGGDATHYADSVKGRFTISRDNSKNTLYLQMNSLRAEDTAVYYCARVDCSGGSCYLGYWGQGTLVTVSSASTKGPSVFPLAPSSKSTSGGTAALGCLVKDYFPEPVTVSWNSGALTSGVHTFPAVLQSSGLYSLSSVVTVPSSSLGTQTYICNVNHKPSNTKVDKKVEPKSCDKTHTCPPCPAPELLGGPSVFLFPPKPKDTLMISRTPEVTCVVVDVSHEDPEVKFNWYVDGVEVHNAKTKPREEQYNSTYRVVSVLTVLHQDWLNGKEYKCKVSNKALPAPIEKTISKAKGQPREPQVYTLPPSREEMTKNQVSLTCLVKGFYPSDIAVEWESNGQPENNYKTTPPVLDSDGSFFLYSKLTVDKSRWQQGNVFSCSVMHEALHNHYTQKSLSLSPG

SEQ ID NO: 66 - DNA, 1413 bp, Artificial Sequence
  IgG1 heavy chain
atggaccccaagggcagcctgagctggagaatcctgctgttcctgagcctggccttcgagctgagctacggcgaggtgcagcttttggagagtggcggtggccttgtgaagcctggcgggagcctgaggctgagctgtgccgccagcggctttacattttccagttactggatgcattgggtgaggcaggccccaggcaagggcctcgagtgggtaagcagcattagcagcaggagcagctacatttactacgccgacagcgtgaagggcaggttcaccatcagcagggatgacagcaagaacaccctgtacctgcagatgaacagcctgaaaaccgaggacaccgccgtgtactactgcgccagggagggcaacggaatggacgtgtggggccagggcaccacggtgactgttagctctgccagcaccaagggccccagcgtgttccctctggcccccagcagcaagagcaccagcggcggaaccgccgccctgggctgcctggtgaaggactacttccccgagcccgtgaccgtgtcctggaacagcggcgctctgaccagcggagtgcacaccttccctgccgtgctgcagagcagcggcctgtactccctgagcagcgtggtgaccgtgcccagcagcagcctgggcacccagacctacatctgcaacgtgaaccacaagccctccaacaccaaggtggacaagaaggtggagcctaagagctgcgacaagacccacacctgccctccctgccccgcccccgagctgctgggcggacccagcgtgttcctgttccctcccaagcccaaggacaccctgatgatcagccgcacccccgaggtgacctgcgtggtggtggacgtgagccacgaggaccccgaggtgaagttcaactggtacgtggacggcgtggaggtgcacaacgccaagaccaagcctcgggaggagcagtacaactccacctaccgcgtggtgagcgtgctgaccgtgctgcaccaggactggctgaacggcaaggagtacaagtgcaaggtgagcaacaaggccctgcccgctcccatcgagaagaccatcagcaaggccaagggccagccccgggagcctcaggtgtacaccctgccccccagccgcgaagagatgaccaagaaccaggtgagcctgacctgcctggtgaagggcttctacccctccgacatcgccgtggagtgggagagcaacggccagcctgagaacaactacaagaccacccctcccgtgctggacagcgacggcagcttcttcctgtacagcaagctgaccgtggacaagtcccggtggcagcagggcaacgtgttcagctgcagcgtgatgcacgaggccctgcacaaccactacacccagaagagcctgagcctgagccccggatagtaa

SEQ ID NO: 67 - protein, 469 aa, Artificial Sequence
  IgG1 heavy chain
MDPKGSLSWRILLFLSLAFELSYGEVQLLESGGGLVKPGGSLRLSCAASGFTFSSYWMHWVRQAPGKGLEWVSSISSRSSYIYYADSVKGRFTISRDDSKNTLYLQMNSLKTEDTAVYYCAREGNGMDVWGQGTTVTVSSASTKGPSVFPLAPSSKSTSGGTAALGCLVKDYFPEPVTVSWNSGALTSGVHTFPAVLQSSGLYSLSSVVTVPSSSLGTQTYICNVNHKPSNTKVDKKVEPKSCDKTHTCPPCPAPELLGGPSVFLFPPKPKDTLMISRTPEVTCVVVDVSHEDPEVKFNWYVDGVEVHNAKTKPREEQYNSTYRVVSVLTVLHQDWLNGKEYKCKVSNKALPAPIEKTISKAKGQPREPQVYTLPPSREEMTKNQVSLTCLVKGFYPSDIAVEWESNGQPENNYKTTPPVLDSDGSFFLYSKLTVDKSRWQQGNVFSCSVMHEALHNHYTQKSLSLSPG

SEQ ID NO: 68 - DNA, 1428 bp, Artificial Sequence
  IgG1 heavy chain
atggaccccaagggcagcctgagctggagaatcctgctgttcctgagcctggccttcgagctgagctacggccaggtgcagctggttcagagcggagccgaggtgaagaagcccggcagcagcgtgaaggttagctgcaaggccagtggcggcaccttcagcagctacgccataagctgggtgaggcaggcacccggacaaggcctggagtggatgggcggcatcatccccatcttcggcaccgctaactacgcccagaaattccagggtagggtgaccatcactgccgacgagagcaccagcaccgcctacatggagctgagcagcctgaggagcgaggacaccgccgtgtactactgcgccaagacacccctgggaaggggatatggcctgttcgactactggggccagggcaccctggtgaccgtgtctagcgcaagcaccaagggccccagcgtgttccctctggcccccagcagcaagagcaccagcggcggaaccgccgccctgggctgcctggtgaaggactacttccccgagcccgtgaccgtgtcctggaacagcggcgctctgaccagcggagtgcacaccttccctgccgtgctgcagagcagcggcctgtactccctgagcagcgtggtgaccgtgcccagcagcagcctgggcacccagacctacatctgcaacgtgaaccacaagccctccaacaccaaggtggacaagaaggtggagcctaagagctgcgacaagacccacacctgccctccctgccccgcccccgagctgctgggcggacccagcgtgttcctgttccctcccaagcccaaggacaccctgatgatcagccgcacccccgaggtgacctgcgtggtggtggacgtgagccacgaggaccccgaggtgaagttcaactggtacgtggacggcgtggaggtgcacaacgccaagaccaagcctcgggaggagcagtacaactccacctaccgcgtggtgagcgtgctgaccgtgctgcaccaggactggctgaacggcaaggagtacaagtgcaaggtgagcaacaaggccctgcccgctcccatcgagaagaccatcagcaaggccaagggccagccccgggagcctcaggtgtacaccctgccccccagccgcgaagagatgaccaagaaccaggtgagcctgacctgcctggtgaagggcttctacccctccgacatcgccgtggagtgggagagcaacggccagcctgagaacaactacaagaccacccctcccgtgctggacagcgacggcagcttcttcctgtacagcaagctgaccgtggacaagtcccggtggcagcagggcaacgtgttcagctgcagcgtgatgcacgaggccctgcacaaccactacacccagaagagcctgagcctgagccccggatagtaa

SEQ ID NO: 69 - protein, 474 aa, Artificial Sequence
  IgG1 heavy chain
MDPKGSLSWRILLFLSLAFELSYGQVQLVQSGAEVKKPGSSVKVSCKASGGTFSSYAISWVRQAPGQGLEWMGGIIPIFGTANYAQKFQGRVTITADESTSTAYMELSSLRSEDTAVYYCAKTPLGRGYGLFDYWGQGTLVTVSSASTKGPSVFPLAPSSKSTSGGTAALGCLVKDYFPEPVTVSWNSGALTSGVHTFPAVLQSSGLYSLSSVVTVPSSSLGTQTYICNVNHKPSNTKVDKKVEPKSCDKTHTCPPCPAPELLGGPSVFLFPPKPKDTLMISRTPEVTCVVVDVSHEDPEVKFNWYVDGVEVHNAKTKPREEQYNSTYRVVSVLTVLHQDWLNGKEYKCKVSNKALPAPIEKTISKAKGQPREPQVYTLPPSREEMTKNQVSLTCLVKGFYPSDIAVEWESNGQPENNYKTTPPVLDSDGSFFLYSKLTVDKSRWQQGNVFSCSVMHEALHNHYTQKSLSLSPG

SEQ ID NO: 70 - DNA, 1413 bp, Artificial Sequence
  IgG1 heavy chain
atggaccccaagggcagcctgagctggagaatcctgctgttcctgagcctggccttcgagctgagctacggccaggtgcagctggtacagagcggagccgaagtgaagaagcccggcagcagcgtgaaggtgagctgcaaggccagcggcggtaccttcagcaactacgccatcagctgggtgaggcaagcccctgggcagggcctggagtggatgggctggatcagcgcctacaacggcaacaccaattacgcccagaagttccagggccgagtgaccatgaccagggacacaagcaccagcaccgtgtacatggagctgagcagcctgaggagcgaggacaccgctgtgtactactgcgccaggagcaccaacgccttggactactggggccagggcaccctggtgaccgtgagctctgccagcaccaagggccccagcgtgttccctctggcccccagcagcaagagcaccagcggcggaaccgccgccctgggctgcctggtgaaggactacttccccgagcccgtgaccgtgtcctggaacagcggcgctctgaccagcggagtgcacaccttccctgccgtgctgcagagcagcggcctgtactccctgagcagcgtggtgaccgtgcccagcagcagcctgggcacccagacctacatctgcaacgtgaaccacaagccctccaacaccaaggtggacaagaaggtggagcctaagagctgcgacaagacccacacctgccctccctgccccgcccccgagctgctgggcggacccagcgtgttcctgttccctcccaagcccaaggacaccctgatgatcagccgcacccccgaggtgacctgcgtggtggtggacgtgagccacgaggaccccgaggtgaagttcaactggtacgtggacggcgtggaggtgcacaacgccaagaccaagcctcgggaggagcagtacaactccacctaccgcgtggtgagcgtgctgaccgtgctgcaccaggactggctgaacggcaaggagtacaagtgcaaggtgagcaacaaggccctgcccgctcccatcgagaagaccatcagcaaggccaagggccagccccgggagcctcaggtgtacaccctgccccccagccgcgaagagatgaccaagaaccaggtgagcctgacctgcctggtgaagggcttctacccctccgacatcgccgtggagtgggagagcaacggccagcctgagaacaactacaagaccacccctcccgtgctggacagcgacggcagcttcttcctgtacagcaagctgaccgtggacaagtcccggtggcagcagggcaacgtgttcagctgcagcgtgatgcacgaggccctgcacaaccactacacccagaagagcctgagcctgagccccggatagtaa

SEQ ID NO: 71 - protein, 469 aa, Artificial Sequence
  IgG1 heavy chain
MDPKGSLSWRILLFLSLAFELSYGQVQLVQSGAEVKKPGSSVKVSCKASGGTFSNYAISWVRQAPGQGLEWMGWISAYNGNTNYAQKFQGRVTMTRDTSTSTVYMELSSLRSEDTAVYYCARSTNALDYWGQGTLVTVSSASTKGPSVFPLAPSSKSTSGGTAALGCLVKDYFPEPVTVSWNSGALTSGVHTFPAVLQSSGLYSLSSVVTVPSSSLGTQTYICNVNHKPSNTKVDKKVEPKSCDKTHTCPPCPAPELLGGPSVFLFPPKPKDTLMISRTPEVTCVVVDVSHEDPEVKFNWYVDGVEVHNAKTKPREEQYNSTYRVVSVLTVLHQDWLNGKEYKCKVSNKALPAPIEKTISKAKGQPREPQVYTLPPSREEMTKNQVSLTCLVKGFYPSDIAVEWESNGQPENNYKTTPPVLDSDGSFFLYSKLTVDKSRWQQGNVFSCSVMHEALHNHYTQKSLSLSPG

SEQ ID NO: 72 - DNA, 1413 bp, Artificial Sequence
  IgG1 heavy chain
atggaccccaagggcagcctgagctggagaatcctgctgttcctgagcctggccttcgagctgagctacggccaggtgcagctggtgcagagtggggccgaggtgaagaaacccggcagcagcgttaaggtgagctgcaaggccagcggctacaccttcagcgattactacatgcactgggtgaggcaggcacccggccagggcctggagtggatgggcggcatcctgcccgtgttcggcaccgccacatacgcccagaagttccaggggagggtgaccatcacggccgacgaaagcacctcaacagcctacatggagctgagcagcctgaggagcgaggacaccgccgtgtactactgcgccaggggcttcggctatttcgactactgggggcagggcaccctggtgaccgtgagctctgccagcaccaagggccccagcgtgttccctctggcccccagcagcaagagcaccagcggcggaaccgccgccctgggctgcctggtgaaggactacttccccgagcccgtgaccgtgtcctggaacagcggcgctctgaccagcggagtgcacaccttccctgccgtgctgcagagcagcggcctgtactccctgagcagcgtggtgaccgtgcccagcagcagcctgggcacccagacctacatctgcaacgtgaaccacaagccctccaacaccaaggtggacaagaaggtggagcctaagagctgcgacaagacccacacctgccctccctgccccgcccccgagctgctgggcggacccagcgtgttcctgttccctcccaagcccaaggacaccctgatgatcagccgcacccccgaggtgacctgcgtggtggtggacgtgagccacgaggaccccgaggtgaagttcaactggtacgtggacggcgtggaggtgcacaacgccaagaccaagcctcgggaggagcagtacaactccacctaccgcgtggtgagcgtgctgaccgtgctgcaccaggactggctgaacggcaaggagtacaagtgcaaggtgagcaacaaggccctgcccgctcccatcgagaagaccatcagcaaggccaagggccagccccgggagcctcaggtgtacaccctgccccccagccgcgaagagatgaccaagaaccaggtgagcctgacctgcctggtgaagggcttctacccctccgacatcgccgtggagtgggagagcaacggccagcctgagaacaactacaagaccacccctcccgtgctggacagcgacggcagcttcttcctgtacagcaagctgaccgtggacaagtcccggtggcagcagggcaacgtgttcagctgcagcgtgatgcacgaggccctgcacaaccactacacccagaagagcctgagcctgagccccggatagtaa

SEQ ID NO: 73 - protein, 469 aa, Artificial Sequence
  IgG1 heavy chain
MDPKGSLSWRILLFLSLAFELSYGQVQLVQSGAEVKKPGSSVKVSCKASGYTFSDYYMHWVRQAPGQGLEWMGGILPVFGTATYAQKFQGRVTITADESTSTAYMELSSLRSEDTAVYYCARGFGYFDYWGQGTLVTVSSASTKGPSVFPLAPSSKSTSGGTAALGCLVKDYFPEPVTVSWNSGALTSGVHTFPAVLQSSGLYSLSSVVTVPSSSLGTQTYICNVNHKPSNTKVDKKVEPKSCDKTHTCPPCPAPELLGGPSVFLFPPKPKDTLMISRTPEVTCVVVDVSHEDPEVKFNWYVDGVEVHNAKTKPREEQYNSTYRVVSVLTVLHQDWLNGKEYKCKVSNKALPAPIEKTISKAKGQPREPQVYTLPPSREEMTKNQVSLTCLVKGFYPSDIAVEWESNGQPENNYKTTPPVLDSDGSFFLYSKLTVDKSRWQQGNVFSCSVMHEALHNHYTQKSLSLSPG

SEQ ID NO: 74 - DNA, 1428 bp, Artificial Sequence
  IgG1 heavy chain
atggaccccaagggcagcctgagctggagaatcctgctgttcctgagcctggccttcgagctgagctacggccaggtgcagctggtgcagagtggagccgaggtgaagaagcccggagcctctgtaaaggtaagctgcaaggccagcggctacaccttcaccggccagtacatgcactgggtgaggcaggctcccggacagggcctggagtggatgggcatcatcaaccccagcgggggaagcaccagttacgcccagaagttccagggaagggtgaccatgaccagggacaccagcacaagcacggtgtacatggagctgagcagcctgaggagcgaggacaccgccgtgtactactgcgccggaagctactacccctactactattacggcatggacgtgtggggccagggcacgaccgtgacagtgagctctgccagcaccaagggccccagcgtgttccctctggcccccagcagcaagagcaccagcggcggaaccgccgccctgggctgcctggtgaaggactacttccccgagcccgtgaccgtgtcctggaacagcggcgctctgaccagcggagtgcacaccttccctgccgtgctgcagagcagcggcctgtactccctgagcagcgtggtgaccgtgcccagcagcagcctgggcacccagacctacatctgcaacgtgaaccacaagccctccaacaccaaggtggacaagaaggtggagcctaagagctgcgacaagacccacacctgccctccctgccccgcccccgagctgctgggcggacccagcgtgttcctgttccctcccaagcccaaggacaccctgatgatcagccgcacccccgaggtgacctgcgtggtggtggacgtgagccacgaggaccccgaggtgaagttcaactggtacgtggacggcgtggaggtgcacaacgccaagaccaagcctcgggaggagcagtacaactccacctaccgcgtggtgagcgtgctgaccgtgctgcaccaggactggctgaacggcaaggagtacaagtgcaaggtgagcaacaaggccctgcccgctcccatcgagaagaccatcagcaaggccaagggccagccccgggagcctcaggtgtacaccctgccccccagccgcgaagagatgaccaagaaccaggtgagcctgacctgcctggtgaagggcttctacccctccgacatcgccgtggagtgggagagcaacggccagcctgagaacaactacaagaccacccctcccgtgctggacagcgacggcagcttcttcctgtacagcaagctgaccgtggacaagtcccggtggcagcagggcaacgtgttcagctgcagcgtgatgcacgaggccctgcacaaccactacacccagaagagcctgagcctgagccccggatagtaa

SEQ ID NO: 75 - protein, 474 aa, Artificial Sequence
  IgG1 heavy chain
MDPKGSLSWRILLFLSLAFELSYGQVQLVQSGAEVKKPGASVKVSCKASGYTFTGQYMHWVRQAPGQGLEWMGIINPSGGSTSYAQKFQGRVTMTRDTSTSTVYMELSSLRSEDTAVYYCAGSYYPYYYYGMDVWGQGTTVTVSSASTKGPSVFPLAPSSKSTSGGTAALGCLVKDYFPEPVTVSWNSGALTSGVHTFPAVLQSSGLYSLSSVVTVPSSSLGTQTYICNVNHKPSNTKVDKKVEPKSCDKTHTCPPCPAPELLGGPSVFLFPPKPKDTLMISRTPEVTCVVVDVSHEDPEVKFNWYVDGVEVHNAKTKPREEQYNSTYRVVSVLTVLHQDWLNGKEYKCKVSNKALPAPIEKTISKAKGQPREPQVYTLPPSREEMTKNQVSLTCLVKGFYPSDIAVEWESNGQPENNYKTTPPVLDSDGSFFLYSKLTVDKSRWQQGNVFSCSVMHEALHNHYTQKSLSLSPG

SEQ ID NO: 76 - DNA, 1422 bp, Artificial Sequence
  IgG1 heavy chain
atggaccccaagggcagcctgagctggagaatcctgctgttcctgagcctggccttcgagctgagctacggccaggtgcagctggtgcagagcggagccgaggtgaagaagcccggcagcagcgtgaaggtgagctgcaaggccagtggcggcaccttcggcaattacggcataaactgggtgaggcaggctcccggacagggcctggagtggatgggcggcatcatccccgtgttcggcaccaccaactacgcccagaagttccagggaagggtgaccatcaccgcggacgagagcacctcaaccgcctacatggagctgagcagcctgaggagcgaggacaccgccgtgtattactgcgccaggggcctcaggtactactacgggatggacgtgtggggccagggcacaaccgtgaccgtgagctctgccagcaccaagggccccagcgtgttccctctggcccccagcagcaagagcaccagcggcggaaccgccgccctgggctgcctggtgaaggactacttccccgagcccgtgaccgtgtcctggaacagcggcgctctgaccagcggagtgcacaccttccctgccgtgctgcagagcagcggcctgtactccctgagcagcgtggtgaccgtgcccagcagcagcctgggcacccagacctacatctgcaacgtgaaccacaagccctccaacaccaaggtggacaagaaggtggagcctaagagctgcgacaagacccacacctgccctccctgccccgcccccgagctgctgggcggacccagcgtgttcctgttccctcccaagcccaaggacaccctgatgatcagccgcacccccgaggtgacctgcgtggtggtggacgtgagccacgaggaccccgaggtgaagttcaactggtacgtggacggcgtggaggtgcacaacgccaagaccaagcctcgggaggagcagtacaactccacctaccgcgtggtgagcgtgctgaccgtgctgcaccaggactggctgaacggcaaggagtacaagtgcaaggtgagcaacaaggccctgcccgctcccatcgagaagaccatcagcaaggccaagggccagccccgggagcctcaggtgtacaccctgccccccagccgcgaagagatgaccaagaaccaggtgagcctgacctgcctggtgaagggcttctacccctccgacatcgccgtggagtgggagagcaacggccagcctgagaacaactacaagaccacccctcccgtgctggacagcgacggcagcttcttcctgtacagcaagctgaccgtggacaagtcccggtggcagcagggcaacgtgttcagctgcagcgtgatgcacgaggccctgcacaaccactacacccagaagagcctgagcctgagccccggatagtaa

SEQ ID NO: 77 - protein, 472 aa, Artificial Sequence
  IgG1 heavy chain
MDPKGSLSWRILLFLSLAFELSYGQVQLVQSGAEVKKPGSSVKVSCKASGGTFGNYGINWVRQAPGQGLEWMGGIIPVFGTTNYAQKFQGRVTITADESTSTAYMELSSLRSEDTAVYYCARGLRYYYGMDVWGQGTTVTVSSASTKGPSVFPLAPSSKSTSGGTAALGCLVKDYFPEPVTVSWNSGALTSGVHTFPAVLQSSGLYSLSSVVTVPSSSLGTQTYICNVNHKPSNTKVDKKVEPKSCDKTHTCPPCPAPELLGGPSVFLFPPKPKDTLMISRTPEVTCVVVDVSHEDPEVKFNWYVDGVEVHNAKTKPREEQYNSTYRVVSVLTVLHQDWLNGKEYKCKVSNKALPAPIEKTISKAKGQPREPQVYTLPPSREEMTKNQVSLTCLVKGFYPSDIAVEWESNGQPENNYKTTPPVLDSDGSFFLYSKLTVDKSRWQQGNVFSCSVMHEALHNHYTQKSLSLSPG

SEQ ID NO: 78 - DNA, 1422 bp, Artificial Sequence
  IgG1 heavy chain
atggaccccaagggcagcctgagctggagaatcctgctgttcctgagcctggccttcgagctgagctacggccaggtgcagctggttcagagcggagctgaggtgaagaagcccggtgccagcgtgaaggtgagctgcaaggccagcggcggtacgttcaccggctacttcatacactgggtgaggcaggcccctggacaaggcctggagtggatgggctggatgaaccccaacagcggcaacacaggctacgcccagaagttccagggaagggtgaccatgaccagggacaccagtaccagcacagtgtacatggagctgtccagcctgaggagcgaggataccgccatgtattactgcgccagggagggccaaggcgtggtgcccgtggactactggggacagggcacactggtgaccgtgagctctgccagcaccaagggccccagcgtgttccctctggcccccagcagcaagagcaccagcggcggaaccgccgccctgggctgcctggtgaaggactacttccccgagcccgtgaccgtgtcctggaacagcggcgctctgaccagcggagtgcacaccttccctgccgtgctgcagagcagcggcctgtactccctgagcagcgtggtgaccgtgcccagcagcagcctgggcacccagacctacatctgcaacgtgaaccacaagccctccaacaccaaggtggacaagaaggtggagcctaagagctgcgacaagacccacacctgccctccctgccccgcccccgagctgctgggcggacccagcgtgttcctgttccctcccaagcccaaggacaccctgatgatcagccgcacccccgaggtgacctgcgtggtggtggacgtgagccacgaggaccccgaggtgaagttcaactggtacgtggacggcgtggaggtgcacaacgccaagaccaagcctcgggaggagcagtacaactccacctaccgcgtggtgagcgtgctgaccgtgctgcaccaggactggctgaacggcaaggagtacaagtgcaaggtgagcaacaaggccctgcccgctcccatcgagaagaccatcagcaaggccaagggccagccccgggagcctcaggtgtacaccctgccccccagccgcgaagagatgaccaagaaccaggtgagcctgacctgcctggtgaagggcttctacccctccgacatcgccgtggagtgggagagcaacggccagcctgagaacaactacaagaccacccctcccgtgctggacagcgacggcagcttcttcctgtacagcaagctgaccgtggacaagtcccggtggcagcagggcaacgtgttcagctgcagcgtgatgcacgaggccctgcacaaccactacacccagaagagcctgagcctgagccccggatagtaa

SEQ ID NO: 79 - protein, 472 aa, Artificial Sequence
  IgG1 heavy chain
MDPKGSLSWRILLFLSLAFELSYGQVQLVQSGAEVKKPGASVKVSCKASGGTFTGYFIHWVRQAPGQGLEWMGWMNPNSGNTGYAQKFQGRVTMTRDTSTSTVYMELSSLRSEDTAMYYCAREGQGVVPVDYWGQGTLVTVSSASTKGPSVFPLAPSSKSTSGGTAALGCLVKDYFPEPVTVSWNSGALTSGVHTFPAVLQSSGLYSLSSVVTVPSSSLGTQTYICNVNHKPSNTKVDKKVEPKSCDKTHTCPPCPAPELLGGPSVFLFPPKPKDTLMISRTPEVTCVVVDVSHEDPEVKFNWYVDGVEVHNAKTKPREEQYNSTYRVVSVLTVLHQDWLNGKEYKCKVSNKALPAPIEKTISKAKGQPREPQVYTLPPSREEMTKNQVSLTCLVKGFYPSDIAVEWESNGQPENNYKTTPPVLDSDGSFFLYSKLTVDKSRWQQGNVFSCSVMHEALHNHYTQKSLSLSPG

SEQ ID NO: 80 - DNA, 1446 bp, Artificial Sequence
  IgG1 heavy chain
atggaccccaagggcagcctgagctggagaatcctgctgttcctgagcctggccttcgagctgagctacggccaggtgcagctggtgcagtccggagccgaagtgaagaagcccggcagcagcgtgaaagtgagctgcaaggcgagcggctacaccttcaccacctatggcatcacctgggtgaggcaggccccaggacagggcctggagtggatgggcggcatcatccccatcttcggcaccgccaactacgcccagaagttccaaggcagggtgaccatcaccgcggatgagagtaccagtaccgcatacatggagctgagcagcctgaggagcgaggacaccgccgtgtactactgcgccaaactgtctggctccagcggctcatgggactactattactactacggcatggacgtgtggggccagggcacactggtgaccgtgagctctgccagcaccaagggccccagcgtgttccctctggcccccagcagcaagagcaccagcggcggaaccgccgccctgggctgcctggtgaaggactacttccccgagcccgtgaccgtgtcctggaacagcggcgctctgaccagcggagtgcacaccttccctgccgtgctgcagagcagcggcctgtactccctgagcagcgtggtgaccgtgcccagcagcagcctgggcacccagacctacatctgcaacgtgaaccacaagccctccaacaccaaggtggacaagaaggtggagcctaagagctgcgacaagacccacacctgccctccctgccccgcccccgagctgctgggcggacccagcgtgttcctgttccctcccaagcccaaggacaccctgatgatcagccgcacccccgaggtgacctgcgtggtggtggacgtgagccacgaggaccccgaggtgaagttcaactggtacgtggacggcgtggaggtgcacaacgccaagaccaagcctcgggaggagcagtacaactccacctaccgcgtggtgagcgtgctgaccgtgctgcaccaggactggctgaacggcaaggagtacaagtgcaaggtgagcaacaaggccctgcccgctcccatcgagaagaccatcagcaaggccaagggccagccccgggagcctcaggtgtacaccctgccccccagccgcgaagagatgaccaagaaccaggtgagcctgacctgcctggtgaagggcttctacccctccgacatcgccgtggagtgggagagcaacggccagcctgagaacaactacaagaccacccctcccgtgctggacagcgacggcagcttcttcctgtacagcaagctgaccgtggacaagtcccggtggcagcagggcaacgtgttcagctgcagcgtgatgcacgaggccctgcacaaccactacacccagaagagcctgagcctgagccccggatagtaa

SEQ ID NO: 81 - protein, 480 aa, Artificial Sequence
  IgG1 heavy chain
MDPKGSLSWRILLFLSLAFELSYGQVQLVQSGAEVKKPGSSVKVSCKASGYTFTTYGITWVRQAPGQGLEWMGGIIPIFGTANYAQKFQGRVTITADESTSTAYMELSSLRSEDTAVYYCAKLSGSSGSWDYYYYYGMDVWGQGTLVTVSSASTKGPSVFPLAPSSKSTSGGTAALGCLVKDYFPEPVTVSWNSGALTSGVHTFPAVLQSSGLYSLSSVVTVPSSSLGTQTYICNVNHKPSNTKVDKKVEPKSCDKTHTCPPCPAPELLGGPSVFLFPPKPKDTLMISRTPEVTCVVVDVSHEDPEVKFNWYVDGVEVHNAKTKPREEQYNSTYRVVSVLTVLHQDWLNGKEYKCKVSNKALPAPIEKTISKAKGQPREPQVYTLPPSREEMTKNQVSLTCLVKGFYPSDIAVEWESNGQPENNYKTTPPVLDSDGSFFLYSKLTVDKSRWQQGNVFSCSVMHEALHNHYTQKSLSLSPG

SEQ ID NO: 82 - DNA, 1419 bp, Artificial Sequence
  IgG1 heavy chain
atggaccccaagggcagcctgagctggagaatcctgctgttcctgagcctggccttcgagctgagctacggccaggtgcagctggtgcagagcggagccgaggtgaagaagcccggcagcagcgtgaaggtgagctgcaaggccagcggcggaacctttagcacctacgccttcagctgggtgaggcaggccccaggccagggcctggagtacatgggcggcatcatccccatgttcggcaccgccaactacgcccagaagttccagggcagggtgaccatcaccgcggacgaaagcaccagtaccgcgtatatggagctgagcagcctgaggagcgaggacaccgccgtgtactactgcgctggcgagaggggctacgggtcactggactactggggacagggaaccctggtgaccgtgagctctgccagcaccaagggccccagcgtgttccctctggcccccagcagcaagagcaccagcggcggaaccgccgccctgggctgcctggtgaaggactacttccccgagcccgtgaccgtgtcctggaacagcggcgctctgaccagcggagtgcacaccttccctgccgtgctgcagagcagcggcctgtactccctgagcagcgtggtgaccgtgcccagcagcagcctgggcacccagacctacatctgcaacgtgaaccacaagccctccaacaccaaggtggacaagaaggtggagcctaagagctgcgacaagacccacacctgccctccctgccccgcccccgagctgctgggcggacccagcgtgttcctgttccctcccaagcccaaggacaccctgatgatcagccgcacccccgaggtgacctgcgtggtggtggacgtgagccacgaggaccccgaggtgaagttcaactggtacgtggacggcgtggaggtgcacaacgccaagaccaagcctcgggaggagcagtacaactccacctaccgcgtggtgagcgtgctgaccgtgctgcaccaggactggctgaacggcaaggagtacaagtgcaaggtgagcaacaaggccctgcccgctcccatcgagaagaccatcagcaaggccaagggccagccccgggagcctcaggtgtacaccctgccccccagccgcgaagagatgaccaagaaccaggtgagcctgacctgcctggtgaagggcttctacccctccgacatcgccgtggagtgggagagcaacggccagcctgagaacaactacaagaccacccctcccgtgctggacagcgacggcagcttcttcctgtacagcaagctgaccgtggacaagtcccggtggcagcagggcaacgtgttcagctgcagcgtgatgcacgaggccctgcacaaccactacacccagaagagcctgagcctgagccccggatagtaa

SEQ ID NO: 83 - protein, 471 aa, Artificial Sequence
  IgG1 heavy chain
MDPKGSLSWRILLFLSLAFELSYGQVQLVQSGAEVKKPGSSVKVSCKASGGTFSTYAFSWVRQAPGQGLEYMGGIIPMFGTANYAQKFQGRVTITADESTSTAYMELSSLRSEDTAVYYCAGERGYGSLDYWGQGTLVTVSSASTKGPSVFPLAPSSKSTSGGTAALGCLVKDYFPEPVTVSWNSGALTSGVHTFPAVLQSSGLYSLSSVVTVPSSSLGTQTYICNVNHKPSNTKVDKKVEPKSCDKTHTCPPCPAPELLGGPSVFLFPPKPKDTLMISRTPEVTCVVVDVSHEDPEVKFNWYVDGVEVHNAKTKPREEQYNSTYRVVSVLTVLHQDWLNGKEYKCKVSNKALPAPIEKTISKAKGQPREPQVYTLPPSREEMTKNQVSLTCLVKGFYPSDIAVEWESNGQPENNYKTTPPVLDSDGSFFLYSKLTVDKSRWQQGNVFSCSVMHEALHNHYTQKSLSLSPG

SEQ ID NO: 84 - DNA, 1425 bp, Artificial Sequence
  IgG1 heavy chain
atggaccccaagggcagcctgagctggagaatcctgctgttcctgagcctggccttcgagctgagctacggcgaggtgcagctcctggagagcggcggtggccttgtgcagcccggtggcagcctgcgcctgagttgcgcggcaagcggcttcaccttcagcaacagcgacatgaattgggttaggcaggcccctggtaagggcctggagtgggtgagcttcattagcagtagcagcggatacacctactacgccgacagcgtgaaggggaggttcaccatcagcagggacaacagcaagaataccctgtacctgcagatgaacagcctgagggccgaggataccgccgtgtattactgcgccagggccaacaacaactggaacttctacttcgactactggggccagggaaccctggtgaccgtgagcagcgccagcaccaagggccccagcgtgttccctctggcccccagcagcaagagcaccagcggcggaaccgccgccctgggctgcctggtgaaggactacttccccgagcccgtgaccgtgtcctggaacagcggcgctctgaccagcggagtgcacaccttccctgccgtgctgcagagcagcggcctgtactccctgagcagcgtggtgaccgtgcccagcagcagcctgggcacccagacctacatctgcaacgtgaaccacaagccctccaacaccaaggtggacaagaaggtggagcctaagagctgcgacaagacccacacctgccctccctgccccgcccccgagctgctgggcggacccagcgtgttcctgttccctcccaagcccaaggacaccctgatgatcagccgcacccccgaggtgacctgcgtggtggtggacgtgagccacgaggaccccgaggtgaagttcaactggtacgtggacggcgtggaggtgcacaacgccaagaccaagcctcgggaggagcagtacaactccacctaccgcgtggtgagcgtgctgaccgtgctgcaccaggactggctgaacggcaaggagtacaagtgcaaggtgagcaacaaggccctgcccgctcccatcgagaagaccatcagcaaggccaagggccagccccgggagcctcaggtgtacaccctgccccccagccgcgaagagatgaccaagaaccaggtgagcctgacctgcctggtgaagggcttctacccctccgacatcgccgtggagtgggagagcaacggccagcctgagaacaactacaagaccacccctcccgtgctggacagcgacggcagcttcttcctgtacagcaagctgaccgtggacaagtcccggtggcagcagggcaacgtgttcagctgcagcgtgatgcacgaggccctgcacaaccactacacccagaagagcctgagcctgagccccggatagtaa

SEQ ID NO: 85 - protein, 473 aa, Artificial Sequence
  IgG1 heavy chain
MDPKGSLSWRILLFLSLAFELSYGEVQLLESGGGLVQPGGSLRLSCAASGFTFSNSDMNWVRQAPGKGLEWVSFISSSSGYTYYADSVKGRFTISRDNSKNTLYLQMNSLRAEDTAVYYCARANNNWNFYFDYWGQGTLVTVSSASTKGPSVFPLAPSSKSTSGGTAALGCLVKDYFPEPVTVSWNSGALTSGVHTFPAVLQSSGLYSLSSVVTVPSSSLGTQTYICNVNHKPSNTKVDKKVEPKSCDKTHTCPPCPAPELLGGPSVFLFPPKPKDTLMISRTPEVTCVVVDVSHEDPEVKFNWYVDGVEVHNAKTKPREEQYNSTYRVVSVLTVLHQDWLNGKEYKCKVSNKALPAPIEKTISKAKGQPREPQVYTLPPSREEMTKNQVSLTCLVKGFYPSDIAVEWESNGQPENNYKTTPPVLDSDGSFFLYSKLTVDKSRWQQGNVFSCSVMHEALHNHYTQKSLSLSPG

SEQ ID NO: 86 - DNA, 1437 bp, Artificial Sequence
  IgG1 heavy chain
atggaccccaagggcagcctgagctggagaatcctgctgttcctgagcctggccttcgagctgagctacggccaggtgcagctggtgcagtccggagcggaggtgaagaagcccggcagcagcgtgaaggtgagctgcaaggccagcggcgacaccttcgacacgtacgccatcagctgggtgaggcaggccccaggccagggcctggagtggatgggcggcatcatccccatcttcggcaccgccaactacgcccagaagttccagggcagggttaccatcaccgcagacgagagcacctccaccgcctacatggagctgagcagcctgaggagcgaggacaccgccgtgtactactgcgccaggagccgaggaagggggtacagctacggcagcggcctgttcgactactggggacagggaaccctggtgaccgtgagctctgccagcaccaagggccccagcgtgttccctctggcccccagcagcaagagcaccagcggcggaaccgccgccctgggctgcctggtgaaggactacttccccgagcccgtgaccgtgtcctggaacagcggcgctctgaccagcggagtgcacaccttccctgccgtgctgcagagcagcggcctgtactccctgagcagcgtggtgaccgtgcccagcagcagcctgggcacccagacctacatctgcaacgtgaaccacaagccctccaacaccaaggtggacaagaaggtggagcctaagagctgcgacaagacccacacctgccctccctgccccgcccccgagctgctgggcggacccagcgtgttcctgttccctcccaagcccaaggacaccctgatgatcagccgcacccccgaggtgacctgcgtggtggtggacgtgagccacgaggaccccgaggtgaagttcaactggtacgtggacggcgtggaggtgcacaacgccaagaccaagcctcgggaggagcagtacaactccacctaccgcgtggtgagcgtgctgaccgtgctgcaccaggactggctgaacggcaaggagtacaagtgcaaggtgagcaacaaggccctgcccgctcccatcgagaagaccatcagcaaggccaagggccagccccgggagcctcaggtgtacaccctgccccccagccgcgaagagatgaccaagaaccaggtgagcctgacctgcctggtgaagggcttctacccctccgacatcgccgtggagtgggagagcaacggccagcctgagaacaactacaagaccacccctcccgtgctggacagcgacggcagcttcttcctgtacagcaagctgaccgtggacaagtcccggtggcagcagggcaacgtgttcagctgcagcgtgatgcacgaggccctgcacaaccactacacccagaagagcctgagcctgagccccggatagtaa

SEQ ID NO: 87 - protein, 477 aa, Artificial Sequence
  IgG1 heavy chain
MDPKGSLSWRILLFLSLAFELSYGQVQLVQSGAEVKKPGSSVKVSCKASGDTFDTYAISWVRQAPGQGLEWMGGIIPIFGTANYAQKFQGRVTITADESTSTAYMELSSLRSEDTAVYYCARSRGRGYSYGSGLFDYWGQGTLVTVSSASTKGPSVFPLAPSSKSTSGGTAALGCLVKDYFPEPVTVSWNSGALTSGVHTFPAVLQSSGLYSLSSVVTVPSSSLGTQTYICNVNHKPSNTKVDKKVEPKSCDKTHTCPPCPAPELLGGPSVFLFPPKPKDTLMISRTPEVTCVVVDVSHEDPEVKFNWYVDGVEVHNAKTKPREEQYNSTYRVVSVLTVLHQDWLNGKEYKCKVSNKALPAPIEKTISKAKGQPREPQVYTLPPSREEMTKNQVSLTCLVKGFYPSDIAVEWESNGQPENNYKTTPPVLDSDGSFFLYSKLTVDKSRWQQGNVFSCSVMHEALHNHYTQKSLSLSPG

SEQ ID NO: 88 - DNA, 1425 bp, Artificial Sequence
  IgG1 heavy chain
atggaccccaagggcagcctgagctggagaatcctgctgttcctgagcctggccttcgagctgagctacggccaggtgcagctggtgcagagcggtgccgaggtgaagaagccgggagcgagtgtgaaagttagctgcaaggccagcggccagaccttcaccgactacgcaatcaactgggtgaggcaggccccaggacagggcctggaatggatgggctggatgaaccccaacagcggcaacaccggctacgcccagaagttccagggcagggtgacaatgaccagggacacttcaaccagcacagtgtacatggagctgagcagcctgcggtcagaggataccgccgtgtactactgcgccagggagaccctggagcaacagctgcccttcgactactggggacaaggcaccctggtgaccgtgagctccgccagcaccaagggccccagcgtgttccctctggcccccagcagcaagagcaccagcggcggaaccgccgccctgggctgcctggtgaaggactacttccccgagcccgtgaccgtgtcctggaacagcggcgctctgaccagcggagtgcacaccttccctgccgtgctgcagagcagcggcctgtactccctgagcagcgtggtgaccgtgcccagcagcagcctgggcacccagacctacatctgcaacgtgaaccacaagccctccaacaccaaggtggacaagaaggtggagcctaagagctgcgacaagacccacacctgccctccctgccccgcccccgagctgctgggcggacccagcgtgttcctgttccctcccaagcccaaggacaccctgatgatcagccgcacccccgaggtgacctgcgtggtggtggacgtgagccacgaggaccccgaggtgaagttcaactggtacgtggacggcgtggaggtgcacaacgccaagaccaagcctcgggaggagcagtacaactccacctaccgcgtggtgagcgtgctgaccgtgctgcaccaggactggctgaacggcaaggagtacaagtgcaaggtgagcaacaaggccctgcccgctcccatcgagaagaccatcagcaaggccaagggccagccccgggagcctcaggtgtacaccctgccccccagccgcgaagagatgaccaagaaccaggtgagcctgacctgcctggtgaagggcttctacccctccgacatcgccgtggagtgggagagcaacggccagcctgagaacaactacaagaccacccctcccgtgctggacagcgacggcagcttcttcctgtacagcaagctgaccgtggacaagtcccggtggcagcagggcaacgtgttcagctgcagcgtgatgcacgaggccctgcacaaccactacacccagaagagcctgagcctgagccccggatagtaa

SEQ ID NO: 89 - protein, 473 aa, Artificial Sequence
  IgG1 heavy chain
MDPKGSLSWRILLFLSLAFELSYGQVQLVQSGAEVKKPGASVKVSCKASGQTFTDYAINWVRQAPGQGLEWMGWMNPNSGNTGYAQKFQGRVTMTRDTSTSTVYMELSSLRSEDTAVYYCARETLEQQLPFDYWGQGTLVTVSSASTKGPSVFPLAPSSKSTSGGTAALGCLVKDYFPEPVTVSWNSGALTSGVHTFPAVLQSSGLYSLSSVVTVPSSSLGTQTYICNVNHKPSNTKVDKKVEPKSCDKTHTCPPCPAPELLGGPSVFLFPPKPKDTLMISRTPEVTCVVVDVSHEDPEVKFNWYVDGVEVHNAKTKPREEQYNSTYRVVSVLTVLHQDWLNGKEYKCKVSNKALPAPIEKTISKAKGQPREPQVYTLPPSREEMTKNQVSLTCLVKGFYPSDIAVEWESNGQPENNYKTTPPVLDSDGSFFLYSKLTVDKSRWQQGNVFSCSVMHEALHNHYTQKSLSLSPG

SEQ ID NO: 90 - DNA, 1413 bp, Artificial Sequence
  IgG1 heavy chain
atggaccccaagggcagcctgagctggagaatcctgctgttcctgagcctggccttcgagctgagctacggccaggtgcagctggtgcagagcggtgccgaggtgaagaagcccggtgccagtgtgaaggtgagctgcaaggccagcgcctacacctttaccagctacggcatcagctggctgaggcaggcacccggccagggcctggagtggatgggctggatcaaccccaacagcggcaacaccggctacgcccacaagtttcagggcagggtgaccatgaccagggacaccagcacaagcaccgtctacatggagctgagcagcctgaggagcgaggacaccgccgtgtactactgcgcccgaggcggcagcggctggcccacctggggacagggcaccctggtgaccgtgagctctgccagcaccaagggccccagcgtgttccctctggcccccagcagcaagagcaccagcggcggaaccgccgccctgggctgcctggtgaaggactacttccccgagcccgtgaccgtgtcctggaacagcggcgctctgaccagcggagtgcacaccttccctgccgtgctgcagagcagcggcctgtactccctgagcagcgtggtgaccgtgcccagcagcagcctgggcacccagacctacatctgcaacgtgaaccacaagccctccaacaccaaggtggacaagaaggtggagcctaagagctgcgacaagacccacacctgccctccctgccccgcccccgagctgctgggcggacccagcgtgttcctgttccctcccaagcccaaggacaccctgatgatcagccgcacccccgaggtgacctgcgtggtggtggacgtgagccacgaggaccccgaggtgaagttcaactggtacgtggacggcgtggaggtgcacaacgccaagaccaagcctcgggaggagcagtacaactccacctaccgcgtggtgagcgtgctgaccgtgctgcaccaggactggctgaacggcaaggagtacaagtgcaaggtgagcaacaaggccctgcccgctcccatcgagaagaccatcagcaaggccaagggccagccccgggagcctcaggtgtacaccctgccccccagccgcgaagagatgaccaagaaccaggtgagcctgacctgcctggtgaagggcttctacccctccgacatcgccgtggagtgggagagcaacggccagcctgagaacaactacaagaccacccctcccgtgctggacagcgacggcagcttcttcctgtacagcaagctgaccgtggacaagtcccggtggcagcagggcaacgtgttcagctgcagcgtgatgcacgaggccctgcacaaccactacacccagaagagcctgagcctgagccccggatagtaa

SEQ ID NO: 91 - protein, 469 aa, Artificial Sequence
  IgG1 heavy chain
MDPKGSLSWRILLFLSLAFELSYGQVQLVQSGAEVKKPGASVKVSCKASAYTFTSYGISWLRQAPGQGLEWMGWINPNSGNTGYAHKFQGRVTMTRDTSTSTVYMELSSLRSEDTAVYYCARGGSGWPTWGQGTLVTVSSASTKGPSVFPLAPSSKSTSGGTAALGCLVKDYFPEPVTVSWNSGALTSGVHTFPAVLQSSGLYSLSSVVTVPSSSLGTQTYICNVNHKPSNTKVDKKVEPKSCDKTHTCPPCPAPELLGGPSVFLFPPKPKDTLMISRTPEVTCVVVDVSHEDPEVKFNWYVDGVEVHNAKTKPREEQYNSTYRVVSVLTVLHQDWLNGKEYKCKVSNKALPAPIEKTISKAKGQPREPQVYTLPPSREEMTKNQVSLTCLVKGFYPSDIAVEWESNGQPENNYKTTPPVLDSDGSFFLYSKLTVDKSRWQQGNVFSCSVMHEALHNHYTQKSLSLSPG

SEQ ID NO: 92 - DNA, 1422 bp, Artificial Sequence
  IgG1 heavy chain
atggaccccaagggcagcctgagctggagaatcctgctgttcctgagcctggccttcgagctgagctacggccaggtgcagctggtgcagagcggtgccgaggtgaagaagcccggtgcgagcgtgaaagtgagctgcaaggccagcggttacaccttcacgagctacggcatcagctgggtgaggcaggcacccggacagggcctggagtggatgggctggatcgaccccaacagtggcggcaccaactacgcccagaagttccaggggagggtgaccatgaccagggataccagcacctccaccgtgtatatggagctgagcagcctgaggagcgaggataccgccgtgtactactgcgccagggacgattggttcagcggcgacctggactactggggccagggcacgcttgtgaccgtaagctctgccagcaccaagggccccagcgtgttccctctggcccccagcagcaagagcaccagcggcggaaccgccgccctgggctgcctggtgaaggactacttccccgagcccgtgaccgtgtcctggaacagcggcgctctgaccagcggagtgcacaccttccctgccgtgctgcagagcagcggcctgtactccctgagcagcgtggtgaccgtgcccagcagcagcctgggcacccagacctacatctgcaacgtgaaccacaagccctccaacaccaaggtggacaagaaggtggagcctaagagctgcgacaagacccacacctgccctccctgccccgcccccgagctgctgggcggacccagcgtgttcctgttccctcccaagcccaaggacaccctgatgatcagccgcacccccgaggtgacctgcgtggtggtggacgtgagccacgaggaccccgaggtgaagttcaactggtacgtggacggcgtggaggtgcacaacgccaagaccaagcctcgggaggagcagtacaactccacctaccgcgtggtgagcgtgctgaccgtgctgcaccaggactggctgaacggcaaggagtacaagtgcaaggtgagcaacaaggccctgcccgctcccatcgagaagaccatcagcaaggccaagggccagccccgggagcctcaggtgtacaccctgccccccagccgcgaagagatgaccaagaaccaggtgagcctgacctgcctggtgaagggcttctacccctccgacatcgccgtggagtgggagagcaacggccagcctgagaacaactacaagaccacccctcccgtgctggacagcgacggcagcttcttcctgtacagcaagctgaccgtggacaagtcccggtggcagcagggcaacgtgttcagctgcagcgtgatgcacgaggccctgcacaaccactacacccagaagagcctgagcctgagccccggatagtaa

SEQ ID NO: 93 - protein, 472 aa, Artificial Sequence
  IgG1 heavy chain
MDPKGSLSWRILLFLSLAFELSYGQVQLVQSGAEVKKPGASVKVSCKASGYTFTSYGISWVRQAPGQGLEWMGWIDPNSGGTNYAQKFQGRVTMTRDTSTSTVYMELSSLRSEDTAVYYCARDDWFSGDLDYWGQGTLVTVSSASTKGPSVFPLAPSSKSTSGGTAALGCLVKDYFPEPVTVSWNSGALTSGVHTFPAVLQSSGLYSLSSVVTVPSSSLGTQTYICNVNHKPSNTKVDKKVEPKSCDKTHTCPPCPAPELLGGPSVFLFPPKPKDTLMISRTPEVTCVVVDVSHEDPEVKFNWYVDGVEVHNAKTKPREEQYNSTYRVVSVLTVLHQDWLNGKEYKCKVSNKALPAPIEKTISKAKGQPREPQVYTLPPSREEMTKNQVSLTCLVKGFYPSDIAVEWESNGQPENNYKTTPPVLDSDGSFFLYSKLTVDKSRWQQGNVFSCSVMHEALHNHYTQKSLSLSPG

SEQ ID NO: 94 - DNA, 1443 bp, Artificial Sequence
  IgG1 heavy chain
atggaccccaagggcagcctgagctggagaatcctgctgttcctgagcctggccttcgagctgagctacggcgaggtgcagttgctggagagcggtggcggcctggtgcaacccggtggctcactgaggctgagctgcgcggctagcggcttcaccttcaccgacgcctggatgaactgggtgaggcaggcacctggcaagggcctggagtgggtgtctaccatcagcgttagcgtgggcgtgacctactatgccgactccgtgaaaggcaggtttactatcagcagggacaacagcaagaacaccctgtacctgcagatgaacagcttgagggccgaggacaccgccgtgtactactgcgccaccatcggcagcatggccactatccgaaagggcgccactgacgcctttgacatctggggccagggcaccctggtgaccgtgagcagcgccagcaccaagggccccagcgtgttccctctggcccccagcagcaagagcaccagcggcggaaccgccgccctgggctgcctggtgaaggactacttccccgagcccgtgaccgtgtcctggaacagcggcgctctgaccagcggagtgcacaccttccctgccgtgctgcagagcagcggcctgtactccctgagcagcgtggtgaccgtgcccagcagcagcctgggcacccagacctacatctgcaacgtgaaccacaagccctccaacaccaaggtggacaagaaggtggagcctaagagctgcgacaagacccacacctgccctccctgccccgcccccgagctgctgggcggacccagcgtgttcctgttccctcccaagcccaaggacaccctgatgatcagccgcacccccgaggtgacctgcgtggtggtggacgtgagccacgaggaccccgaggtgaagttcaactggtacgtggacggcgtggaggtgcacaacgccaagaccaagcctcgggaggagcagtacaactccacctaccgcgtggtgagcgtgctgaccgtgctgcaccaggactggctgaacggcaaggagtacaagtgcaaggtgagcaacaaggccctgcccgctcccatcgagaagaccatcagcaaggccaagggccagccccgggagcctcaggtgtacaccctgccccccagccgcgaagagatgaccaagaaccaggtgagcctgacctgcctggtgaagggcttctacccctccgacatcgccgtggagtgggagagcaacggccagcctgagaacaactacaagaccacccctcccgtgctggacagcgacggcagcttcttcctgtacagcaagctgaccgtggacaagtcccggtggcagcagggcaacgtgttcagctgcagcgtgatgcacgaggccctgcacaaccactacacccagaagagcctgagcctgagccccggatagtaa

SEQ ID NO: 95 - protein, 479 aa, Artificial Sequence
  IgG1 heavy chain
MDPKGSLSWRILLFLSLAFELSYGEVQLLESGGGLVQPGGSLRLSCAASGFTFTDAWMNWVRQAPGKGLEWVSTISVSVGVTYYADSVKGRFTISRDNSKNTLYLQMNSLRAEDTAVYYCATIGSMATIRKGATDAFDIWGQGTLVTVSSASTKGPSVFPLAPSSKSTSGGTAALGCLVKDYFPEPVTVSWNSGALTSGVHTFPAVLQSSGLYSLSSVVTVPSSSLGTQTYICNVNHKPSNTKVDKKVEPKSCDKTHTCPPCPAPELLGGPSVFLFPPKPKDTLMISRTPEVTCVVVDVSHEDPEVKFNWYVDGVEVHNAKTKPREEQYNSTYRVVSVLTVLHQDWLNGKEYKCKVSNKALPAPIEKTISKAKGQPREPQVYTLPPSREEMTKNQVSLTCLVKGFYPSDIAVEWESNGQPENNYKTTPPVLDSDGSFFLYSKLTVDKSRWQQGNVFSCSVMHEALHNHYTQKSLSLSPG

SEQ ID NO: 96 - DNA, 1434 bp, Artificial Sequence
  IgG1 heavy chain
atggaccccaagggcagcctgagctggagaatcctgctgttcctgagcctggccttcgagctgagctacggccaggtgcagctggtccagagcggtgcggaagtgaagaagcccggcagcagcgtgaaggtaagctgcaaggccagcggcggaaccttcagcagctacgccatcagctgggtgaggcaggcccctggtcagggactggagtggatgggcaccatcatccccatgttcggcatcgccgactacgcccagaagttccagggaagggtgaccatcaccgcagacgagagcacgagtaccgcctacatggagctgagcagcctgaggagcgaggacaccgccgtgtactactgcgctcgaagcagcaggagcagctcctggtacaactggtacttcgacctgtggggcaggggcaccctggtgaccgtgagctctgccagcaccaagggccccagcgtgttccctctggcccccagcagcaagagcaccagcggcggaaccgccgccctgggctgcctggtgaaggactacttccccgagcccgtgaccgtgtcctggaacagcggcgctctgaccagcggagtgcacaccttccctgccgtgctgcagagcagcggcctgtactccctgagcagcgtggtgaccgtgcccagcagcagcctgggcacccagacctacatctgcaacgtgaaccacaagccctccaacaccaaggtggacaagaaggtggagcctaagagctgcgacaagacccacacctgccctccctgccccgcccccgagctgctgggcggacccagcgtgttcctgttccctcccaagcccaaggacaccctgatgatcagccgcacccccgaggtgacctgcgtggtggtggacgtgagccacgaggaccccgaggtgaagttcaactggtacgtggacggcgtggaggtgcacaacgccaagaccaagcctcgggaggagcagtacaactccacctaccgcgtggtgagcgtgctgaccgtgctgcaccaggactggctgaacggcaaggagtacaagtgcaaggtgagcaacaaggccctgcccgctcccatcgagaagaccatcagcaaggccaagggccagccccgggagcctcaggtgtacaccctgccccccagccgcgaagagatgaccaagaaccaggtgagcctgacctgcctggtgaagggcttctacccctccgacatcgccgtggagtgggagagcaacggccagcctgagaacaactacaagaccacccctcccgtgctggacagcgacggcagcttcttcctgtacagcaagctgaccgtggacaagtcccggtggcagcagggcaacgtgttcagctgcagcgtgatgcacgaggccctgcacaaccactacacccagaagagcctgagcctgagccccggatagtaa

SEQ ID NO: 97 - protein, 476 aa, Artificial Sequence
  IgG1 heavy chain
MDPKGSLSWRILLFLSLAFELSYGQVQLVQSGAEVKKPGSSVKVSCKASGGTFSSYAISWVRQAPGQGLEWMGTIIPMFGIADYAQKFQGRVTITADESTSTAYMELSSLRSEDTAVYYCARSSRSSSWYNWYFDLWGRGTLVTVSSASTKGPSVFPLAPSSKSTSGGTAALGCLVKDYFPEPVTVSWNSGALTSGVHTFPAVLQSSGLYSLSSVVTVPSSSLGTQTYICNVNHKPSNTKVDKKVEPKSCDKTHTCPPCPAPELLGGPSVFLFPPKPKDTLMISRTPEVTCVVVDVSHEDPEVKFNWYVDGVEVHNAKTKPREEQYNSTYRVVSVLTVLHQDWLNGKEYKCKVSNKALPAPIEKTISKAKGQPREPQVYTLPPSREEMTKNQVSLTCLVKGFYPSDIAVEWESNGQPENNYKTTPPVLDSDGSFFLYSKLTVDKSRWQQGNVFSCSVMHEALHNHYTQKSLSLSPG

SEQ ID NO: 98 - DNA, 1416 bp, Artificial Sequence
  IgG1 heavy chain
atggaccccaagggcagcctgagctggagaatcctgctgttcctgagcctggccttcgagctgagctacggccaggtgcaactggtgcagagcggagcagaagtgaagaagcccggcagcagcgtgaaagtgagctgcaaggccagcggctacaccttcaccagctactacatgcagtgggtgaggcaggctcctggccaaggcctggagtggatgggcggcatcatccccatcttcggcaccgctaactacgcccagaagttccagggcagggtgaccataaccgccgatgagagcactagcactgcctacatggagctgagcagcctgaggagcgaggacaccgccgtgtactactgcgccagggccaggtttggggccgtagactactgggggcaaggcaccctggtgaccgtgagctctgccagcaccaagggccccagcgtgttccctctggcccccagcagcaagagcaccagcggcggaaccgccgccctgggctgcctggtgaaggactacttccccgagcccgtgaccgtgtcctggaacagcggcgctctgaccagcggagtgcacaccttccctgccgtgctgcagagcagcggcctgtactccctgagcagcgtggtgaccgtgcccagcagcagcctgggcacccagacctacatctgcaacgtgaaccacaagccctccaacaccaaggtggacaagaaggtggagcctaagagctgcgacaagacccacacctgccctccctgccccgcccccgagctgctgggcggacccagcgtgttcctgttccctcccaagcccaaggacaccctgatgatcagccgcacccccgaggtgacctgcgtggtggtggacgtgagccacgaggaccccgaggtgaagttcaactggtacgtggacggcgtggaggtgcacaacgccaagaccaagcctcgggaggagcagtacaactccacctaccgcgtggtgagcgtgctgaccgtgctgcaccaggactggctgaacggcaaggagtacaagtgcaaggtgagcaacaaggccctgcccgctcccatcgagaagaccatcagcaaggccaagggccagccccgggagcctcaggtgtacaccctgccccccagccgcgaagagatgaccaagaaccaggtgagcctgacctgcctggtgaagggcttctacccctccgacatcgccgtggagtgggagagcaacggccagcctgagaacaactacaagaccacccctcccgtgctggacagcgacggcagcttcttcctgtacagcaagctgaccgtggacaagtcccggtggcagcagggcaacgtgttcagctgcagcgtgatgcacgaggccctgcacaaccactacacccagaagagcctgagcctgagccccggatagtaa

SEQ ID NO: 99 - protein, 470 aa, Artificial Sequence
  IgG1 heavy chain
MDPKGSLSWRILLFLSLAFELSYGQVQLVQSGAEVKKPGSSVKVSCKASGYTFTSYYMQWVRQAPGQGLEWMGGIIPIFGTANYAQKFQGRVTITADESTSTAYMELSSLRSEDTAVYYCARARFGAVDYWGQGTLVTVSSASTKGPSVFPLAPSSKSTSGGTAALGCLVKDYFPEPVTVSWNSGALTSGVHTFPAVLQSSGLYSLSSVVTVPSSSLGTQTYICNVNHKPSNTKVDKKVEPKSCDKTHTCPPCPAPELLGGPSVFLFPPKPKDTLMISRTPEVTCVVVDVSHEDPEVKFNWYVDGVEVHNAKTKPREEQYNSTYRVVSVLTVLHQDWLNGKEYKCKVSNKALPAPIEKTISKAKGQPREPQVYTLPPSREEMTKNQVSLTCLVKGFYPSDIAVEWESNGQPENNYKTTPPVLDSDGSFFLYSKLTVDKSRWQQGNVFSCSVMHEALHNHYTQKSLSLSPG

SEQ ID NO: 100 - DNA, 1452 bp, Artificial Sequence
  IgG1 heavy chain
atggaccccaagggcagcctgagctggagaatcctgctgttcctgagcctggccttcgagctgagctacggccaggtgcagctggttcagagcggtgcggaagtgaagaagcccggtgccagcgtgaaggtgagctgcaaagccagcggctacactttcacctcttattacatccactgggtgaggcaggcccctggacagggcctggaatggatgggcatcatcaaccccagcgccgacaccaccacctacgcccagcagttccagggcagggtgaccatgaccagggacacctctaccagcactgtgtacatggagctgagcagcctgaggagcgaggacaccgccgtgtactactgcgccaggaccccaggcaattatggcggcaactccctgggctactactattactacggcatggacgtgtggggccagggaacactggtgactgtgagctctgccagcaccaagggccccagcgtgttccctctggcccccagcagcaagagcaccagcggcggaaccgccgccctgggctgcctggtgaaggactacttccccgagcccgtgaccgtgtcctggaacagcggcgctctgaccagcggagtgcacaccttccctgccgtgctgcagagcagcggcctgtactccctgagcagcgtggtgaccgtgcccagcagcagcctgggcacccagacctacatctgcaacgtgaaccacaagccctccaacaccaaggtggacaagaaggtggagcctaagagctgcgacaagacccacacctgccctccctgccccgcccccgagctgctgggcggacccagcgtgttcctgttccctcccaagcccaaggacaccctgatgatcagccgcacccccgaggtgacctgcgtggtggtggacgtgagccacgaggaccccgaggtgaagttcaactggtacgtggacggcgtggaggtgcacaacgccaagaccaagcctcgggaggagcagtacaactccacctaccgcgtggtgagcgtgctgaccgtgctgcaccaggactggctgaacggcaaggagtacaagtgcaaggtgagcaacaaggccctgcccgctcccatcgagaagaccatcagcaaggccaagggccagccccgggagcctcaggtgtacaccctgccccccagccgcgaagagatgaccaagaaccaggtgagcctgacctgcctggtgaagggcttctacccctccgacatcgccgtggagtgggagagcaacggccagcctgagaacaactacaagaccacccctcccgtgctggacagcgacggcagcttcttcctgtacagcaagctgaccgtggacaagtcccggtggcagcagggcaacgtgttcagctgcagcgtgatgcacgaggccctgcacaaccactacacccagaagagcctgagcctgagccccggatagtaa

SEQ ID NO: 101 - protein, 482 aa, Artificial Sequence
  IgG1 heavy chain
MDPKGSLSWRILLFLSLAFELSYGQVQLVQSGAEVKKPGASVKVSCKASGYTFTSYYIHWVRQAPGQGLEWMGIINPSADTTTYAQQFQGRVTMTRDTSTSTVYMELSSLRSEDTAVYYCARTPGNYGGNSLGYYYYYGMDVWGQGTLVTVSSASTKGPSVFPLAPSSKSTSGGTAALGCLVKDYFPEPVTVSWNSGALTSGVHTFPAVLQSSGLYSLSSVVTVPSSSLGTQTYICNVNHKPSNTKVDKKVEPKSCDKTHTCPPCPAPELLGGPSVFLFPPKPKDTLMISRTPEVTCVVVDVSHEDPEVKFNWYVDGVEVHNAKTKPREEQYNSTYRVVSVLTVLHQDWLNGKEYKCKVSNKALPAPIEKTISKAKGQPREPQVYTLPPSREEMTKNQVSLTCLVKGFYPSDIAVEWESNGQPENNYKTTPPVLDSDGSFFLYSKLTVDKSRWQQGNVFSCSVMHEALHNHYTQKSLSLSPG

SEQ ID NO: 102 - DNA, 1449 bp, Artificial Sequence
  IgG1 heavy chain
atggaccccaagggcagcctgagctggagaatcctgctgttcctgagcctggccttcgagctgagctacggccaggtgcagctggtccaatccggtgccgaggtgaagaagcccggcagcagcgtgaaggtgagctgcaaggccagcggctacacattcaccgactaccagatgcactgggtgaggcaggcacccggacagggcctggagtgggtgggcgtgatcaaccccggtggaggcagcaccacctacgcccagaccttccagggcagggtgaccatcaccgccgacgagagcacctcaaccgcctacatggagctgagcagcctgaggagcgaggacaccgctgtgtactactgcgccaggggaggcgtggagtacagctctagctgggattactattactactatggcatggacgtgtggggacaaggtaccacagtgaccgtgagctctgccagcaccaagggccccagcgtgttccctctggcccccagcagcaagagcaccagcggcggaaccgccgccctgggctgcctggtgaaggactacttccccgagcccgtgaccgtgtcctggaacagcggcgctctgaccagcggagtgcacaccttccctgccgtgctgcagagcagcggcctgtactccctgagcagcgtggtgaccgtgcccagcagcagcctgggcacccagacctacatctgcaacgtgaaccacaagccctccaacaccaaggtggacaagaaggtggagcctaagagctgcgacaagacccacacctgccctccctgccccgcccccgagctgctgggcggacccagcgtgttcctgttccctcccaagcccaaggacaccctgatgatcagccgcacccccgaggtgacctgcgtggtggtggacgtgagccacgaggaccccgaggtgaagttcaactggtacgtggacggcgtggaggtgcacaacgccaagaccaagcctcgggaggagcagtacaactccacctaccgcgtggtgagcgtgctgaccgtgctgcaccaggactggctgaacggcaaggagtacaagtgcaaggtgagcaacaaggccctgcccgctcccatcgagaagaccatcagcaaggccaagggccagccccgggagcctcaggtgtacaccctgccccccagccgcgaagagatgaccaagaaccaggtgagcctgacctgcctggtgaagggcttctacccctccgacatcgccgtggagtgggagagcaacggccagcctgagaacaactacaagaccacccctcccgtgctggacagcgacggcagcttcttcctgtacagcaagctgaccgtggacaagtcccggtggcagcagggcaacgtgttcagctgcagcgtgatgcacgaggccctgcacaaccactacacccagaagagcctgagcctgagccccggatagtaa

SEQ ID NO: 103 - protein, 481 aa, Artificial Sequence
  IgG1 heavy chain
MDPKGSLSWRILLFLSLAFELSYGQVQLVQSGAEVKKPGSSVKVSCKASGYTFTDYQMHWVRQAPGQGLEWVGVINPGGGSTTYAQTFQGRVTITADESTSTAYMELSSLRSEDTAVYYCARGGVEYSSSWDYYYYYGMDVWGQGTTVTVSSASTKGPSVFPLAPSSKSTSGGTAALGCLVKDYFPEPVTVSWNSGALTSGVHTFPAVLQSSGLYSLSSVVTVPSSSLGTQTYICNVNHKPSNTKVDKKVEPKSCDKTHTCPPCPAPELLGGPSVFLFPPKPKDTLMISRTPEVTCVVVDVSHEDPEVKFNWYVDGVEVHNAKTKPREEQYNSTYRVVSVLTVLHQDWLNGKEYKCKVSNKALPAPIEKTISKAKGQPREPQVYTLPPSREEMTKNQVSLTCLVKGFYPSDIAVEWESNGQPENNYKTTPPVLDSDGSFFLYSKLTVDKSRWQQGNVFSCSVMHEALHNHYTQKSLSLSPG

SEQ ID NO: 104 - DNA, 1428 bp, Artificial Sequence
  IgG1 heavy chain
atggaccccaagggcagcctgagctggagaatcctgctgttcctgagcctggccttcgagctgagctacggccaggtgcagctggtgcagagcggtgccgaggtgaagaagcctggcgcctcagtaaaggtgagctgcaaggccagcggctacaccttcaacagccactgggtgcattgggtgaggcaggctcccggacagggcctggagtggatgggctggatcagcgcctacaacggcaacaccaactacgcccagaagctgcagggcagggtgaccatgaccagggacaccagcacctccacggtgtacatggagctgagcagcctgaggagcgaggacaccgccgtgtactactgcgcctccggcgactacccctattactactacggcatggacgtgtggggccagggcaccaccgtgaccgtgagctctgccagcaccaagggccccagcgtgttccctctggcccccagcagcaagagcaccagcggcggaaccgccgccctgggctgcctggtgaaggactacttccccgagcccgtgaccgtgtcctggaacagcggcgctctgaccagcggagtgcacaccttccctgccgtgctgcagagcagcggcctgtactccctgagcagcgtggtgaccgtgcccagcagcagcctgggcacccagacctacatctgcaacgtgaaccacaagccctccaacaccaaggtggacaagaaggtggagcctaagagctgcgacaagacccacacctgccctccctgccccgcccccgagctgctgggcggacccagcgtgttcctgttccctcccaagcccaaggacaccctgatgatcagccgcacccccgaggtgacctgcgtggtggtggacgtgagccacgaggaccccgaggtgaagttcaactggtacgtggacggcgtggaggtgcacaacgccaagaccaagcctcgggaggagcagtacaactccacctaccgcgtggtgagcgtgctgaccgtgctgcaccaggactggctgaacggcaaggagtacaagtgcaaggtgagcaacaaggccctgcccgctcccatcgagaagaccatcagcaaggccaagggccagccccgggagcctcaggtgtacaccctgccccccagccgcgaagagatgaccaagaaccaggtgagcctgacctgcctggtgaagggcttctacccctccgacatcgccgtggagtgggagagcaacggccagcctgagaacaactacaagaccacccctcccgtgctggacagcgacggcagcttcttcctgtacagcaagctgaccgtggacaagtcccggtggcagcagggcaacgtgttcagctgcagcgtgatgcacgaggccctgcacaaccactacacccagaagagcctgagcctgagccccggatagtaa

SEQ ID NO: 105 - protein, 474 aa, Artificial Sequence
  IgG1 heavy chain
MDPKGSLSWRILLFLSLAFELSYGQVQLVQSGAEVKKPGASVKVSCKASGYTFNSHWVHWVRQAPGQGLEWMGWISAYNGNTNYAQKLQGRVTMTRDTSTSTVYMELSSLRSEDTAVYYCASGDYPYYYYGMDVWGQGTTVTVSSASTKGPSVFPLAPSSKSTSGGTAALGCLVKDYFPEPVTVSWNSGALTSGVHTFPAVLQSSGLYSLSSVVTVPSSSLGTQTYICNVNHKPSNTKVDKKVEPKSCDKTHTCPPCPAPELLGGPSVFLFPPKPKDTLMISRTPEVTCVVVDVSHEDPEVKFNWYVDGVEVHNAKTKPREEQYNSTYRVVSVLTVLHQDWLNGKEYKCKVSNKALPAPIEKTISKAKGQPREPQVYTLPPSREEMTKNQVSLTCLVKGFYPSDIAVEWESNGQPENNYKTTPPVLDSDGSFFLYSKLTVDKSRWQQGNVFSCSVMHEALHNHYTQKSLSLSPG

SEQ ID NO: 106 - DNA, 1425 bp, Artificial Sequence
  IgG1 heavy chain
atggaccccaagggcagcctgagctggagaatcctgctgttcctgagcctggccttcgagctgagctacggccaggtgcagctggtgcagagcggcgctcaggtgaagaagcccggtgccagcgtgaaggtgagctgcaaggccagcggctacactttcagcagctactatatccactgggtgaggcaagcgccaggacagggcctggaatggatgggctggatcaacccccacagcggcggaaccaattacggccaggagttccaggggagggtgaccatgaccagggacaccagtaccagcaccgtctacatggagctgagcagcctgaggagcgaggacaccgccgtgtactactgcgctagggacagcagcggaatgggtgccaccatcggctactgggggcagggcaccctggtgaccgttagcagtgccagcaccaagggccccagcgtgttccctctggcccccagcagcaagagcaccagcggcggaaccgccgccctgggctgcctggtgaaggactacttccccgagcccgtgaccgtgtcctggaacagcggcgctctgaccagcggagtgcacaccttccctgccgtgctgcagagcagcggcctgtactccctgagcagcgtggtgaccgtgcccagcagcagcctgggcacccagacctacatctgcaacgtgaaccacaagccctccaacaccaaggtggacaagaaggtggagcctaagagctgcgacaagacccacacctgccctccctgccccgcccccgagctgctgggcggacccagcgtgttcctgttccctcccaagcccaaggacaccctgatgatcagccgcacccccgaggtgacctgcgtggtggtggacgtgagccacgaggaccccgaggtgaagttcaactggtacgtggacggcgtggaggtgcacaacgccaagaccaagcctcgggaggagcagtacaactccacctaccgcgtggtgagcgtgctgaccgtgctgcaccaggactggctgaacggcaaggagtacaagtgcaaggtgagcaacaaggccctgcccgctcccatcgagaagaccatcagcaaggccaagggccagccccgggagcctcaggtgtacaccctgccccccagccgcgaagagatgaccaagaaccaggtgagcctgacctgcctggtgaagggcttctacccctccgacatcgccgtggagtgggagagcaacggccagcctgagaacaactacaagaccacccctcccgtgctggacagcgacggcagcttcttcctgtacagcaagctgaccgtggacaagtcccggtggcagcagggcaacgtgttcagctgcagcgtgatgcacgaggccctgcacaaccactacacccagaagagcctgagcctgagccccggatagtaa

SEQ ID NO: 107 - protein, 473 aa, Artificial Sequence
  IgG1 heavy chain
MDPKGSLSWRILLFLSLAFELSYGQVQLVQSGAQVKKPGASVKVSCKASGYTFSSYYIHWVRQAPGQGLEWMGWINPHSGGTNYGQEFQGRVTMTRDTSTSTVYMELSSLRSEDTAVYYCARDSSGMGATIGYWGQGTLVTVSSASTKGPSVFPLAPSSKSTSGGTAALGCLVKDYFPEPVTVSWNSGALTSGVHTFPAVLQSSGLYSLSSVVTVPSSSLGTQTYICNVNHKPSNTKVDKKVEPKSCDKTHTCPPCPAPELLGGPSVFLFPPKPKDTLMISRTPEVTCVVVDVSHEDPEVKFNWYVDGVEVHNAKTKPREEQYNSTYRVVSVLTVLHQDWLNGKEYKCKVSNKALPAPIEKTISKAKGQPREPQVYTLPPSREEMTKNQVSLTCLVKGFYPSDIAVEWESNGQPENNYKTTPPVLDSDGSFFLYSKLTVDKSRWQQGNVFSCSVMHEALHNHYTQKSLSLSPG

SEQ ID NO: 108 - DNA, 1431 bp, Artificial Sequence
  IgG1 heavy chain
atggaccccaagggcagcctgagctggagaatcctgctgttcctgagcctggccttcgagctgagctacggcgaggtgcagttgcttgagtccggcggaggcctggtgaaacccggaggtagcctgaggctgagctgtgcggccagcggcttcaccttcagcagctactggatgagctgggtcaggcaggcccctggcaagggcctggagtgggtgagcgctatcagcggcaccgccatcaacacctactacgccgatagcgtgaagggcaggttcaccattagcagggacgacagcaagaacaccctgtacctgcagatgaacagcctgaagaccgaggacacagccgtgtactactgcgccagggtgcggagggattcctcaggtggtggggctttcgacatctggggccagggcacgatggtcaccgtgtcaagcgccagcaccaagggccccagcgtgttccctctggcccccagcagcaagagcaccagcggcggaaccgccgccctgggctgcctggtgaaggactacttccccgagcccgtgaccgtgtcctggaacagcggcgctctgaccagcggagtgcacaccttccctgccgtgctgcagagcagcggcctgtactccctgagcagcgtggtgaccgtgcccagcagcagcctgggcacccagacctacatctgcaacgtgaaccacaagccctccaacaccaaggtggacaagaaggtggagcctaagagctgcgacaagacccacacctgccctccctgccccgcccccgagctgctgggcggacccagcgtgttcctgttccctcccaagcccaaggacaccctgatgatcagccgcacccccgaggtgacctgcgtggtggtggacgtgagccacgaggaccccgaggtgaagttcaactggtacgtggacggcgtggaggtgcacaacgccaagaccaagcctcgggaggagcagtacaactccacctaccgcgtggtgagcgtgctgaccgtgctgcaccaggactggctgaacggcaaggagtacaagtgcaaggtgagcaacaaggccctgcccgctcccatcgagaagaccatcagcaaggccaagggccagccccgggagcctcaggtgtacaccctgccccccagccgcgaagagatgaccaagaaccaggtgagcctgacctgcctggtgaagggcttctacccctccgacatcgccgtggagtgggagagcaacggccagcctgagaacaactacaagaccacccctcccgtgctggacagcgacggcagcttcttcctgtacagcaagctgaccgtggacaagtcccggtggcagcagggcaacgtgttcagctgcagcgtgatgcacgaggccctgcacaaccactacacccagaagagcctgagcctgagccccggatagtaa

SEQ ID NO: 109 - protein, 475 aa, Artificial Sequence
  IgG1 heavy chain
MDPKGSLSWRILLFLSLAFELSYGEVQLLESGGGLVKPGGSLRLSCAASGFTFSSYWMSWVRQAPGKGLEWVSAISGTAINTYYADSVKGRFTISRDDSKNTLYLQMNSLKTEDTAVYYCARVRRDSSGGGAFDIWGQGTMVTVSSASTKGPSVFPLAPSSKSTSGGTAALGCLVKDYFPEPVTVSWNSGALTSGVHTFPAVLQSSGLYSLSSVVTVPSSSLGTQTYICNVNHKPSNTKVDKKVEPKSCDKTHTCPPCPAPELLGGPSVFLFPPKPKDTLMISRTPEVTCVVVDVSHEDPEVKFNWYVDGVEVHNAKTKPREEQYNSTYRVVSVLTVLHQDWLNGKEYKCKVSNKALPAPIEKTISKAKGQPREPQVYTLPPSREEMTKNQVSLTCLVKGFYPSDIAVEWESNGQPENNYKTTPPVLDSDGSFFLYSKLTVDKSRWQQGNVFSCSVMHEALHNHYTQKSLSLSPG

SEQ ID NO: 110 - DNA, 1413 bp, Artificial Sequence
  IgG1 heavy chain
atggaccccaagggcagcctgagctggagaatcctgctgttcctgagcctggccttcgagctgagctacggccaggtgcagctggtacagagcggagcggaagtgaagaagcccggcagcagcgtgaaggttagctgcaaggccagcggtggcaccttcagcagctacgccatcagctgggtgaggcaagccccaggacagggcctggaatggatgggcggcatcgtgcccatcttcgagaccgccaactacgcccagaagttccaaggcagggtgaccatcacagccgacgagagcaccagcaccgcctacatggagctgagcagcctgaggagcgaggacaccgccgtgtactactgcgccagggacacccccaacttcgactactggggccagggcaccctggtgaccgtgagctctgccagcaccaagggccccagcgtgttccctctggcccccagcagcaagagcaccagcggcggaaccgccgccctgggctgcctggtgaaggactacttccccgagcccgtgaccgtgtcctggaacagcggcgctctgaccagcggagtgcacaccttccctgccgtgctgcagagcagcggcctgtactccctgagcagcgtggtgaccgtgcccagcagcagcctgggcacccagacctacatctgcaacgtgaaccacaagccctccaacaccaaggtggacaagaaggtggagcctaagagctgcgacaagacccacacctgccctccctgccccgcccccgagctgctgggcggacccagcgtgttcctgttccctcccaagcccaaggacaccctgatgatcagccgcacccccgaggtgacctgcgtggtggtggacgtgagccacgaggaccccgaggtgaagttcaactggtacgtggacggcgtggaggtgcacaacgccaagaccaagcctcgggaggagcagtacaactccacctaccgcgtggtgagcgtgctgaccgtgctgcaccaggactggctgaacggcaaggagtacaagtgcaaggtgagcaacaaggccctgcccgctcccatcgagaagaccatcagcaaggccaagggccagccccgggagcctcaggtgtacaccctgccccccagccgcgaagagatgaccaagaaccaggtgagcctgacctgcctggtgaagggcttctacccctccgacatcgccgtggagtgggagagcaacggccagcctgagaacaactacaagaccacccctcccgtgctggacagcgacggcagcttcttcctgtacagcaagctgaccgtggacaagtcccggtggcagcagggcaacgtgttcagctgcagcgtgatgcacgaggccctgcacaaccactacacccagaagagcctgagcctgagccccggatagtaa

SEQ ID NO: 111 - protein, 469 aa, Artificial Sequence
  IgG1 heavy chain
MDPKGSLSWRILLFLSLAFELSYGQVQLVQSGAEVKKPGSSVKVSCKASGGTFSSYAISWVRQAPGQGLEWMGGIVPIFETANYAQKFQGRVTITADESTSTAYMELSSLRSEDTAVYYCARDTPNFDYWGQGTLVTVSSASTKGPSVFPLAPSSKSTSGGTAALGCLVKDYFPEPVTVSWNSGALTSGVHTFPAVLQSSGLYSLSSVVTVPSSSLGTQTYICNVNHKPSNTKVDKKVEPKSCDKTHTCPPCPAPELLGGPSVFLFPPKPKDTLMISRTPEVTCVVVDVSHEDPEVKFNWYVDGVEVHNAKTKPREEQYNSTYRVVSVLTVLHQDWLNGKEYKCKVSNKALPAPIEKTISKAKGQPREPQVYTLPPSREEMTKNQVSLTCLVKGFYPSDIAVEWESNGQPENNYKTTPPVLDSDGSFFLYSKLTVDKSRWQQGNVFSCSVMHEALHNHYTQKSLSLSPG

SEQ ID NO: 112 - DNA, 1422 bp, Artificial Sequence
  IgG1 heavy chain
atggaccccaagggcagcctgagctggagaatcctgctgttcctgagcctggccttcgagctgagctacggcgaggtgcaactgctcgagagcggcggtggcctggtgaagcccggaggcagcctgaggctgagctgtgccgccagcggtttcacattcagcagctactggatgagctgggtgaggcaggctccgggaaagggcctggagtgggttagcagcatcagcggcaccagcaactatatgtactacgccgacagcgtgaagggcaggttcaccatcagcagggacgacagcaagaacaccctgtacctgcagatgaacagcttgaagaccgaggacaccgctgtgtattactgcgccagggaccggggttttctgggctactttgactactggggccagggcacccttgttacagtgagctctgccagcaccaagggccccagcgtgttccctctggcccccagcagcaagagcaccagcggcggaaccgccgccctgggctgcctggtgaaggactacttccccgagcccgtgaccgtgtcctggaacagcggcgctctgaccagcggagtgcacaccttccctgccgtgctgcagagcagcggcctgtactccctgagcagcgtggtgaccgtgcccagcagcagcctgggcacccagacctacatctgcaacgtgaaccacaagccctccaacaccaaggtggacaagaaggtggagcctaagagctgcgacaagacccacacctgccctccctgccccgcccccgagctgctgggcggacccagcgtgttcctgttccctcccaagcccaaggacaccctgatgatcagccgcacccccgaggtgacctgcgtggtggtggacgtgagccacgaggaccccgaggtgaagttcaactggtacgtggacggcgtggaggtgcacaacgccaagaccaagcctcgggaggagcagtacaactccacctaccgcgtggtgagcgtgctgaccgtgctgcaccaggactggctgaacggcaaggagtacaagtgcaaggtgagcaacaaggccctgcccgctcccatcgagaagaccatcagcaaggccaagggccagccccgggagcctcaggtgtacaccctgccccccagccgcgaagagatgaccaagaaccaggtgagcctgacctgcctggtgaagggcttctacccctccgacatcgccgtggagtgggagagcaacggccagcctgagaacaactacaagaccacccctcccgtgctggacagcgacggcagcttcttcctgtacagcaagctgaccgtggacaagtcccggtggcagcagggcaacgtgttcagctgcagcgtgatgcacgaggccctgcacaaccactacacccagaagagcctgagcctgagccccggatagtaa

SEQ ID NO: 113 - protein, 472 aa, Artificial Sequence
  IgG1 heavy chain
MDPKGSLSWRILLFLSLAFELSYGEVQLLESGGGLVKPGGSLRLSCAASGFTFSSYWMSWVRQAPGKGLEWVSSISGTSNYMYYADSVKGRFTISRDDSKNTLYLQMNSLKTEDTAVYYCARDRGFLGYFDYWGQGTLVTVSSASTKGPSVFPLAPSSKSTSGGTAALGCLVKDYFPEPVTVSWNSGALTSGVHTFPAVLQSSGLYSLSSVVTVPSSSLGTQTYICNVNHKPSNTKVDKKVEPKSCDKTHTCPPCPAPELLGGPSVFLFPPKPKDTLMISRTPEVTCVVVDVSHEDPEVKFNWYVDGVEVHNAKTKPREEQYNSTYRVVSVLTVLHQDWLNGKEYKCKVSNKALPAPIEKTISKAKGQPREPQVYTLPPSREEMTKNQVSLTCLVKGFYPSDIAVEWESNGQPENNYKTTPPVLDSDGSFFLYSKLTVDKSRWQQGNVFSCSVMHEALHNHYTQKSLSLSPG

SEQ ID NO: 114 - DNA, 1425 bp, Artificial Sequence
  IgG1 heavy chain
atggaccccaagggcagcctgagctggagaatcctgctgttcctgagcctggccttcgagctgagctacggccaggtgcagctggtgcaaagcggagccgaggtgaagaagcccggcagcagcgtgaaggtaagctgcaaggccagcggttacacgttcaccaattactacatgcactgggtgaggcaggccccaggccagggcctggagtggatgggcggcatcatccccatcttcggcactgccaactacgcccagaagttccagggcagggtgaccatcaccgccgacgagagcactagcaccgcctacatggagctgagcagcctgaggagcgaggacaccgcagtgtactactgcgccaggggaggctattacgacagcagtcagttcgacatctgggggcaaggcacaatggtgaccgtgagctctgccagcaccaagggccccagcgtgttccctctggcccccagcagcaagagcaccagcggcggaaccgccgccctgggctgcctggtgaaggactacttccccgagcccgtgaccgtgtcctggaacagcggcgctctgaccagcggagtgcacaccttccctgccgtgctgcagagcagcggcctgtactccctgagcagcgtggtgaccgtgcccagcagcagcctgggcacccagacctacatctgcaacgtgaaccacaagccctccaacaccaaggtggacaagaaggtggagcctaagagctgcgacaagacccacacctgccctccctgccccgcccccgagctgctgggcggacccagcgtgttcctgttccctcccaagcccaaggacaccctgatgatcagccgcacccccgaggtgacctgcgtggtggtggacgtgagccacgaggaccccgaggtgaagttcaactggtacgtggacggcgtggaggtgcacaacgccaagaccaagcctcgggaggagcagtacaactccacctaccgcgtggtgagcgtgctgaccgtgctgcaccaggactggctgaacggcaaggagtacaagtgcaaggtgagcaacaaggccctgcccgctcccatcgagaagaccatcagcaaggccaagggccagccccgggagcctcaggtgtacaccctgccccccagccgcgaagagatgaccaagaaccaggtgagcctgacctgcctggtgaagggcttctacccctccgacatcgccgtggagtgggagagcaacggccagcctgagaacaactacaagaccacccctcccgtgctggacagcgacggcagcttcttcctgtacagcaagctgaccgtggacaagtcccggtggcagcagggcaacgtgttcagctgcagcgtgatgcacgaggccctgcacaaccactacacccagaagagcctgagcctgagccccggatagtaa

SEQ ID NO: 115 - protein, 473 aa, Artificial Sequence
  IgG1 heavy chain
MDPKGSLSWRILLFLSLAFELSYGQVQLVQSGAEVKKPGSSVKVSCKASGYTFTNYYMHWVRQAPGQGLEWMGGIIPIFGTANYAQKFQGRVTITADESTSTAYMELSSLRSEDTAVYYCARGGYYDSSQFDIWGQGTMVTVSSASTKGPSVFPLAPSSKSTSGGTAALGCLVKDYFPEPVTVSWNSGALTSGVHTFPAVLQSSGLYSLSSVVTVPSSSLGTQTYICNVNHKPSNTKVDKKVEPKSCDKTHTCPPCPAPELLGGPSVFLFPPKPKDTLMISRTPEVTCVVVDVSHEDPEVKFNWYVDGVEVHNAKTKPREEQYNSTYRVVSVLTVLHQDWLNGKEYKCKVSNKALPAPIEKTISKAKGQPREPQVYTLPPSREEMTKNQVSLTCLVKGFYPSDIAVEWESNGQPENNYKTTPPVLDSDGSFFLYSKLTVDKSRWQQGNVFSCSVMHEALHNHYTQKSLSLSPG

SEQ ID NO: 116 - DNA, 1416 bp, Artificial Sequence
  IgG1 heavy chain
atggaccccaagggcagcctgagctggagaatcctgctgttcctgagcctggccttcgagctgagctacggcgaggtgcagttgctgcagagcggaggcggactggtgcagcccggtggtagtctgaggctgagctgcgccgcaagcgagttcaccttcagcaacgcctggatgagctgggtgaggcaggcccctggcaagggcctggagtgggtaagcaccatcagcggcaccagcaggtacacctactacgccgacagcgtgaagggcaggttcaccattagcagggacaacagcaagaacagcctctacttgcagatgaatagcctgagggccgaggacaccgccgtgtactactgcgccagggaccaggacggaaggctggactactggggccagggcaccctggtgaccgtgagcagcgccagcaccaagggccccagcgtgttccctctggcccccagcagcaagagcaccagcggcggaaccgccgccctgggctgcctggtgaaggactacttccccgagcccgtgaccgtgtcctggaacagcggcgctctgaccagcggagtgcacaccttccctgccgtgctgcagagcagcggcctgtactccctgagcagcgtggtgaccgtgcccagcagcagcctgggcacccagacctacatctgcaacgtgaaccacaagccctccaacaccaaggtggacaagaaggtggagcctaagagctgcgacaagacccacacctgccctccctgccccgcccccgagctgctgggcggacccagcgtgttcctgttccctcccaagcccaaggacaccctgatgatcagccgcacccccgaggtgacctgcgtggtggtggacgtgagccacgaggaccccgaggtgaagttcaactggtacgtggacggcgtggaggtgcacaacgccaagaccaagcctcgggaggagcagtacaactccacctaccgcgtggtgagcgtgctgaccgtgctgcaccaggactggctgaacggcaaggagtacaagtgcaaggtgagcaacaaggccctgcccgctcccatcgagaagaccatcagcaaggccaagggccagccccgggagcctcaggtgtacaccctgccccccagccgcgaagagatgaccaagaaccaggtgagcctgacctgcctggtgaagggcttctacccctccgacatcgccgtggagtgggagagcaacggccagcctgagaacaactacaagaccacccctcccgtgctggacagcgacggcagcttcttcctgtacagcaagctgaccgtggacaagtcccggtggcagcagggcaacgtgttcagctgcagcgtgatgcacgaggccctgcacaaccactacacccagaagagcctgagcctgagccccggatagtaa

SEQ ID NO: 117 - protein, 470 aa, Artificial Sequence
  IgG1 heavy chain
MDPKGSLSWRILLFLSLAFELSYGEVQLLQSGGGLVQPGGSLRLSCAASEFTFSNAWMSWVRQAPGKGLEWVSTISGTSRYTYYADSVKGRFTISRDNSKNSLYLQMNSLRAEDTAVYYCARDQDGRLDYWGQGTLVTVSSASTKGPSVFPLAPSSKSTSGGTAALGCLVKDYFPEPVTVSWNSGALTSGVHTFPAVLQSSGLYSLSSVVTVPSSSLGTQTYICNVNHKPSNTKVDKKVEPKSCDKTHTCPPCPAPELLGGPSVFLFPPKPKDTLMISRTPEVTCVVVDVSHEDPEVKFNWYVDGVEVHNAKTKPREEQYNSTYRVVSVLTVLHQDWLNGKEYKCKVSNKALPAPIEKTISKAKGQPREPQVYTLPPSREEMTKNQVSLTCLVKGFYPSDIAVEWESNGQPENNYKTTPPVLDSDGSFFLYSKLTVDKSRWQQGNVFSCSVMHEALHNHYTQKSLSLSPG

SEQ ID NO: 118 - DNA, 1440 bp, Artificial Sequence
  IgG1 heavy chain
atggaccccaagggcagcctgagctggagaatcctgctgttcctgagcctggccttcgagctgagctacggccaggtgcagctggtgcaaagcggtgcggaggtgaagaagcccggtgccagcgtgaaggtgagctgcaaggccagcggcggtaccctgagcagctacgccataagctgggtgaggcaggcacccggacagggcctggagtggatgggcggcatcagcccctacaacggcaaagccaactacgccgagaaactgcagggcagggtgaccatgaccagggacaccagcacctcaaccgtgtatatggagctgagctccctgaggagcgaggacaccgccgtctactactgtgccatcaggagcatcgccgccagggagggcgtatattactactacatggacgtgtggggcaagggcaccaccgtgaccgtgagctctgccagcaccaagggccccagcgtgttccctctggcccccagcagcaagagcaccagcggcggaaccgccgccctgggctgcctggtgaaggactacttccccgagcccgtgaccgtgtcctggaacagcggcgctctgaccagcggagtgcacaccttccctgccgtgctgcagagcagcggcctgtactccctgagcagcgtggtgaccgtgcccagcagcagcctgggcacccagacctacatctgcaacgtgaaccacaagccctccaacaccaaggtggacaagaaggtggagcctaagagctgcgacaagacccacacctgccctccctgccccgcccccgagctgctgggcggacccagcgtgttcctgttccctcccaagcccaaggacaccctgatgatcagccgcacccccgaggtgacctgcgtggtggtggacgtgagccacgaggaccccgaggtgaagttcaactggtacgtggacggcgtggaggtgcacaacgccaagaccaagcctcgggaggagcagtacaactccacctaccgcgtggtgagcgtgctgaccgtgctgcaccaggactggctgaacggcaaggagtacaagtgcaaggtgagcaacaaggccctgcccgctcccatcgagaagaccatcagcaaggccaagggccagccccgggagcctcaggtgtacaccctgccccccagccgcgaagagatgaccaagaaccaggtgagcctgacctgcctggtgaagggcttctacccctccgacatcgccgtggagtgggagagcaacggccagcctgagaacaactacaagaccacccctcccgtgctggacagcgacggcagcttcttcctgtacagcaagctgaccgtggacaagtcccggtggcagcagggcaacgtgttcagctgcagcgtgatgcacgaggccctgcacaaccactacacccagaagagcctgagcctgagccccggatagtaa

SEQ ID NO: 119 - protein, 478 aa, Artificial Sequence
  IgG1 heavy chain
MDPKGSLSWRILLFLSLAFELSYGQVQLVQSGAEVKKPGASVKVSCKASGGTLSSYAISWVRQAPGQGLEWMGGISPYNGKANYAEKLQGRVTMTRDTSTSTVYMELSSLRSEDTAVYYCAIRSIAAREGVYYYYMDVWGKGTTVTVSSASTKGPSVFPLAPSSKSTSGGTAALGCLVKDYFPEPVTVSWNSGALTSGVHTFPAVLQSSGLYSLSSVVTVPSSSLGTQTYICNVNHKPSNTKVDKKVEPKSCDKTHTCPPCPAPELLGGPSVFLFPPKPKDTLMISRTPEVTCVVVDVSHEDPEVKFNWYVDGVEVHNAKTKPREEQYNSTYRVVSVLTVLHQDWLNGKEYKCKVSNKALPAPIEKTISKAKGQPREPQVYTLPPSREEMTKNQVSLTCLVKGFYPSDIAVEWESNGQPENNYKTTPPVLDSDGSFFLYSKLTVDKSRWQQGNVFSCSVMHEALHNHYTQKSLSLSPG

SEQ ID NO: 120 - DNA, 1428 bp, Artificial Sequence
  IgG1 heavy chain
atggaccccaagggcagcctgagctggagaatcctgctgttcctgagcctggccttcgagctgagctacggccaggtgcagctggtgcagagcggggcagaggtgaagaagcccggagccagcgtgaaggtgagctgcaaggccagcggagcggctttcaacactgtggccatcagctgggtgaggcaggctcccggacagggcctggagtggatgggctggatgaaccccaacagcggcaacaccggctacgcccagaagtttcagggcagggtgaccatgaccagggacaccagcaccagtaccgtttacatggagctgagcagcctgaggagcgaggataccgccgtgtactactgcgccaggacccccgctgctgcaggaactgtgtatttcgactactggggccagggcaccctggtgaccgtgagctccgccagcaccaagggccccagcgtgttccctctggcccccagcagcaagagcaccagcggcggaaccgccgccctgggctgcctggtgaaggactacttccccgagcccgtgaccgtgtcctggaacagcggcgctctgaccagcggagtgcacaccttccctgccgtgctgcagagcagcggcctgtactccctgagcagcgtggtgaccgtgcccagcagcagcctgggcacccagacctacatctgcaacgtgaaccacaagccctccaacaccaaggtggacaagaaggtggagcctaagagctgcgacaagacccacacctgccctccctgccccgcccccgagctgctgggcggacccagcgtgttcctgttccctcccaagcccaaggacaccctgatgatcagccgcacccccgaggtgacctgcgtggtggtggacgtgagccacgaggaccccgaggtgaagttcaactggtacgtggacggcgtggaggtgcacaacgccaagaccaagcctcgggaggagcagtacaactccacctaccgcgtggtgagcgtgctgaccgtgctgcaccaggactggctgaacggcaaggagtacaagtgcaaggtgagcaacaaggccctgcccgctcccatcgagaagaccatcagcaaggccaagggccagccccgggagcctcaggtgtacaccctgccccccagccgcgaagagatgaccaagaaccaggtgagcctgacctgcctggtgaagggcttctacccctccgacatcgccgtggagtgggagagcaacggccagcctgagaacaactacaagaccacccctcccgtgctggacagcgacggcagcttcttcctgtacagcaagctgaccgtggacaagtcccggtggcagcagggcaacgtgttcagctgcagcgtgatgcacgaggccctgcacaaccactacacccagaagagcctgagcctgagccccggatagtaa

SEQ ID NO: 121 - protein, 474 aa, Artificial Sequence
  IgG1 heavy chain
MDPKGSLSWRILLFLSLAFELSYGQVQLVQSGAEVKKPGASVKVSCKASGAAFNTVAISWVRQAPGQGLEWMGWMNPNSGNTGYAQKFQGRVTMTRDTSTSTVYMELSSLRSEDTAVYYCARTPAAAGTVYFDYWGQGTLVTVSSASTKGPSVFPLAPSSKSTSGGTAALGCLVKDYFPEPVTVSWNSGALTSGVHTFPAVLQSSGLYSLSSVVTVPSSSLGTQTYICNVNHKPSNTKVDKKVEPKSCDKTHTCPPCPAPELLGGPSVFLFPPKPKDTLMISRTPEVTCVVVDVSHEDPEVKFNWYVDGVEVHNAKTKPREEQYNSTYRVVSVLTVLHQDWLNGKEYKCKVSNKALPAPIEKTISKAKGQPREPQVYTLPPSREEMTKNQVSLTCLVKGFYPSDIAVEWESNGQPENNYKTTPPVLDSDGSFFLYSKLTVDKSRWQQGNVFSCSVMHEALHNHYTQKSLSLSPG

SEQ ID NO: 122 - DNA, 1440 bp, Artificial Sequence
  IgG1 heavy chain
atggaccccaagggcagcctgagctggagaatcctgctgttcctgagcctggccttcgagctgagctacggccaggtgcagttggtccagtccggcgcagaggtgaagaagcccggcagcagcgtgaaggtgagctgcaaagccagtggcggcagcttcagcaggagcagcatcagctgggtgaggcaagcaccgggtcagggcctggagtggatgggcggcatcatccccatcttcggagcccccgtttacgcccaggacctgcaaggaagagtgaccattaccgccgatgagagcacgagcaccgcctatatggagctgagcagcctgaggagcgaggacaccgctgtgtactactgcgccagggaccacccccattgtagcagcaccagctgttactacggcatggacgtgtggggccaaggcaccaccgtgaccgtgagctctgccagcaccaagggccccagcgtgttccctctggcccccagcagcaagagcaccagcggcggaaccgccgccctgggctgcctggtgaaggactacttccccgagcccgtgaccgtgtcctggaacagcggcgctctgaccagcggagtgcacaccttccctgccgtgctgcagagcagcggcctgtactccctgagcagcgtggtgaccgtgcccagcagcagcctgggcacccagacctacatctgcaacgtgaaccacaagccctccaacaccaaggtggacaagaaggtggagcctaagagctgcgacaagacccacacctgccctccctgccccgcccccgagctgctgggcggacccagcgtgttcctgttccctcccaagcccaaggacaccctgatgatcagccgcacccccgaggtgacctgcgtggtggtggacgtgagccacgaggaccccgaggtgaagttcaactggtacgtggacggcgtggaggtgcacaacgccaagaccaagcctcgggaggagcagtacaactccacctaccgcgtggtgagcgtgctgaccgtgctgcaccaggactggctgaacggcaaggagtacaagtgcaaggtgagcaacaaggccctgcccgctcccatcgagaagaccatcagcaaggccaagggccagccccgggagcctcaggtgtacaccctgccccccagccgcgaagagatgaccaagaaccaggtgagcctgacctgcctggtgaagggcttctacccctccgacatcgccgtggagtgggagagcaacggccagcctgagaacaactacaagaccacccctcccgtgctggacagcgacggcagcttcttcctgtacagcaagctgaccgtggacaagtcccggtggcagcagggcaacgtgttcagctgcagcgtgatgcacgaggccctgcacaaccactacacccagaagagcctgagcctgagccccggatagtaa

SEQ ID NO: 123 - protein, 478 aa, Artificial Sequence
  IgG1 heavy chain
MDPKGSLSWRILLFLSLAFELSYGQVQLVQSGAEVKKPGSSVKVSCKASGGSFSRSSISWVRQAPGQGLEWMGGIIPIFGAPVYAQDLQGRVTITADESTSTAYMELSSLRSEDTAVYYCARDHPHCSSTSCYYGMDVWGQGTTVTVSSASTKGPSVFPLAPSSKSTSGGTAALGCLVKDYFPEPVTVSWNSGALTSGVHTFPAVLQSSGLYSLSSVVTVPSSSLGTQTYICNVNHKPSNTKVDKKVEPKSCDKTHTCPPCPAPELLGGPSVFLFPPKPKDTLMISRTPEVTCVVVDVSHEDPEVKFNWYVDGVEVHNAKTKPREEQYNSTYRVVSVLTVLHQDWLNGKEYKCKVSNKALPAPIEKTISKAKGQPREPQVYTLPPSREEMTKNQVSLTCLVKGFYPSDIAVEWESNGQPENNYKTTPPVLDSDGSFFLYSKLTVDKSRWQQGNVFSCSVMHEALHNHYTQKSLSLSPG

SEQ ID NO: 124 - DNA, 1440 bp, Artificial Sequence
  IgG1 heavy chain
atggaccccaagggcagcctgagctggagaatcctgctgttcctgagcctggccttcgagctgagctacggccaggtgcagttggttcagagcggtgccgaggtgaagaagcccggcagcagcgtgaaggtgagctgcaaggccagcggcggtaccttcagcaattacgccatcagctgggtgaggcaagcgcctggccaaggcctggagtggatgggctggatcagcgcttacaacggcaacaccaactacgcccagaagttccagggcagggtgaccatcaccgccgacgaaagcaccagcaccgcctacatggagctgagcagcctgaggagcgaggacaccgctgtgtactactgcgccaggctgtccaccgttaccaccaggccctactactattatggcatggacgtgtgggggcaaggcaccaccgtgacagtgagctctgccagcaccaagggccccagcgtgttccctctggcccccagcagcaagagcaccagcggcggaaccgccgccctgggctgcctggtgaaggactacttccccgagcccgtgaccgtgtcctggaacagcggcgctctgaccagcggagtgcacaccttccctgccgtgctgcagagcagcggcctgtactccctgagcagcgtggtgaccgtgcccagcagcagcctgggcacccagacctacatctgcaacgtgaaccacaagccctccaacaccaaggtggacaagaaggtggagcctaagagctgcgacaagacccacacctgccctccctgccccgcccccgagctgctgggcggacccagcgtgttcctgttccctcccaagcccaaggacaccctgatgatcagccgcacccccgaggtgacctgcgtggtggtggacgtgagccacgaggaccccgaggtgaagttcaactggtacgtggacggcgtggaggtgcacaacgccaagaccaagcctcgggaggagcagtacaactccacctaccgcgtggtgagcgtgctgaccgtgctgcaccaggactggctgaacggcaaggagtacaagtgcaaggtgagcaacaaggccctgcccgctcccatcgagaagaccatcagcaaggccaagggccagccccgggagcctcaggtgtacaccctgccccccagccgcgaagagatgaccaagaaccaggtgagcctgacctgcctggtgaagggcttctacccctccgacatcgccgtggagtgggagagcaacggccagcctgagaacaactacaagaccacccctcccgtgctggacagcgacggcagcttcttcctgtacagcaagctgaccgtggacaagtcccggtggcagcagggcaacgtgttcagctgcagcgtgatgcacgaggccctgcacaaccactacacccagaagagcctgagcctgagccccggatagtaa

SEQ ID NO: 125 - protein, 478 aa, Artificial Sequence
  IgG1 heavy chain
MDPKGSLSWRILLFLSLAFELSYGQVQLVQSGAEVKKPGSSVKVSCKASGGTFSNYAISWVRQAPGQGLEWMGWISAYNGNTNYAQKFQGRVTITADESTSTAYMELSSLRSEDTAVYYCARLSTVTTRPYYYYGMDVWGQGTTVTVSSASTKGPSVFPLAPSSKSTSGGTAALGCLVKDYFPEPVTVSWNSGALTSGVHTFPAVLQSSGLYSLSSVVTVPSSSLGTQTYICNVNHKPSNTKVDKKVEPKSCDKTHTCPPCPAPELLGGPSVFLFPPKPKDTLMISRTPEVTCVVVDVSHEDPEVKFNWYVDGVEVHNAKTKPREEQYNSTYRVVSVLTVLHQDWLNGKEYKCKVSNKALPAPIEKTISKAKGQPREPQVYTLPPSREEMTKNQVSLTCLVKGFYPSDIAVEWESNGQPENNYKTTPPVLDSDGSFFLYSKLTVDKSRWQQGNVFSCSVMHEALHNHYTQKSLSLSPG

SEQ ID NO: 126 - DNA, 1434 bp, Artificial Sequence
  IgG1 heavy chain
atggaccccaagggcagcctgagctggagaatcctgctgttcctgagcctggccttcgagctgagctacggccaggtgcagttggtgcaaagcggcgcagaggtgaagaagcccggcagcagcgtgaaggtgagctgcaaggccagcggcggtaccttcagcagctacgccattagctgggtgaggcaggcacctggccaaggcctggagtggatgggcggcatcatccccatcttcggcaccgccaactacgcccagaagttccagggcagggtgaccatcactgccgacgagagcaccagcaccgcgtacatggagctgagcagcctgaggagcgaggacaccgccgtgtactactgtgccagagtgccagccgattactattattactactatggcatggacgtgtggggccagggtacaaccgtgaccgtgagctctgccagcaccaagggccccagcgtgttccctctggcccccagcagcaagagcaccagcggcggaaccgccgccctgggctgcctggtgaaggactacttccccgagcccgtgaccgtgtcctggaacagcggcgctctgaccagcggagtgcacaccttccctgccgtgctgcagagcagcggcctgtactccctgagcagcgtggtgaccgtgcccagcagcagcctgggcacccagacctacatctgcaacgtgaaccacaagccctccaacaccaaggtggacaagaaggtggagcctaagagctgcgacaagacccacacctgccctccctgccccgcccccgagctgctgggcggacccagcgtgttcctgttccctcccaagcccaaggacaccctgatgatcagccgcacccccgaggtgacctgcgtggtggtggacgtgagccacgaggaccccgaggtgaagttcaactggtacgtggacggcgtggaggtgcacaacgccaagaccaagcctcgggaggagcagtacaactccacctaccgcgtggtgagcgtgctgaccgtgctgcaccaggactggctgaacggcaaggagtacaagtgcaaggtgagcaacaaggccctgcccgctcccatcgagaagaccatcagcaaggccaagggccagccccgggagcctcaggtgtacaccctgccccccagccgcgaagagatgaccaagaaccaggtgagcctgacctgcctggtgaagggcttctacccctccgacatcgccgtggagtgggagagcaacggccagcctgagaacaactacaagaccacccctcccgtgctggacagcgacggcagcttcttcctgtacagcaagctgaccgtggacaagtcccggtggcagcagggcaacgtgttcagctgcagcgtgatgcacgaggccctgcacaaccactacacccagaagagcctgagcctgagccccggatagtaa

SEQ ID NO: 127 - protein, 476 aa, Artificial Sequence
  IgG1 heavy chain
MDPKGSLSWRILLFLSLAFELSYGQVQLVQSGAEVKKPGSSVKVSCKASGGTFSSYAISWVRQAPGQGLEWMGGIIPIFGTANYAQKFQGRVTITADESTSTAYMELSSLRSEDTAVYYCARVPADYYYYYYGMDVWGQGTTVTVSSASTKGPSVFPLAPSSKSTSGGTAALGCLVKDYFPEPVTVSWNSGALTSGVHTFPAVLQSSGLYSLSSVVTVPSSSLGTQTYICNVNHKPSNTKVDKKVEPKSCDKTHTCPPCPAPELLGGPSVFLFPPKPKDTLMISRTPEVTCVVVDVSHEDPEVKFNWYVDGVEVHNAKTKPREEQYNSTYRVVSVLTVLHQDWLNGKEYKCKVSNKALPAPIEKTISKAKGQPREPQVYTLPPSREEMTKNQVSLTCLVKGFYPSDIAVEWESNGQPENNYKTTPPVLDSDGSFFLYSKLTVDKSRWQQGNVFSCSVMHEALHNHYTQKSLSLSPG

SEQ ID NO: 128 - DNA, 1416 bp, Artificial Sequence
  IgG1 heavy chain
atggaccccaagggcagcctgagctggagaatcctgctgttcctgagcctggccttcgagctgagctacggcgaggtgcagttgctggagagcggaggcggcctggtgcagccaggcgggagcctgaggctgagctgtgccgccagcgggttcaccgttagctccaactacatgagctgggtgaggcaggcccctggtaagggcctggagtgggtgtcagccatcagcggctctggtggctccacctattacgccgacagcgtgaaagggaggttcacaatcagcagggacaacagcaagaacaccctgtacctgcagatgaacagccttcgggccgaggacaccgccgtgtactactgcgcgaggggcaggttcggcagccgagatgtgtggggaaagggcaccaccgtgaccgtgagctctgccagcaccaagggccccagcgtgttccctctggcccccagcagcaagagcaccagcggcggaaccgccgccctgggctgcctggtgaaggactacttccccgagcccgtgaccgtgtcctggaacagcggcgctctgaccagcggagtgcacaccttccctgccgtgctgcagagcagcggcctgtactccctgagcagcgtggtgaccgtgcccagcagcagcctgggcacccagacctacatctgcaacgtgaaccacaagccctccaacaccaaggtggacaagaaggtggagcctaagagctgcgacaagacccacacctgccctccctgccccgcccccgagctgctgggcggacccagcgtgttcctgttccctcccaagcccaaggacaccctgatgatcagccgcacccccgaggtgacctgcgtggtggtggacgtgagccacgaggaccccgaggtgaagttcaactggtacgtggacggcgtggaggtgcacaacgccaagaccaagcctcgggaggagcagtacaactccacctaccgcgtggtgagcgtgctgaccgtgctgcaccaggactggctgaacggcaaggagtacaagtgcaaggtgagcaacaaggccctgcccgctcccatcgagaagaccatcagcaaggccaagggccagccccgggagcctcaggtgtacaccctgccccccagccgcgaagagatgaccaagaaccaggtgagcctgacctgcctggtgaagggcttctacccctccgacatcgccgtggagtgggagagcaacggccagcctgagaacaactacaagaccacccctcccgtgctggacagcgacggcagcttcttcctgtacagcaagctgaccgtggacaagtcccggtggcagcagggcaacgtgttcagctgcagcgtgatgcacgaggccctgcacaaccactacacccagaagagcctgagcctgagccccggatagtaa

SEQ ID NO: 129 - protein, 470 aa, Artificial Sequence
  IgG1 heavy chain
MDPKGSLSWRILLFLSLAFELSYGEVQLLESGGGLVQPGGSLRLSCAASGFTVSSNYMSWVRQAPGKGLEWVSAISGSGGSTYYADSVKGRFTISRDNSKNTLYLQMNSLRAEDTAVYYCARGRFGSRDVWGKGTTVTVSSASTKGPSVFPLAPSSKSTSGGTAALGCLVKDYFPEPVTVSWNSGALTSGVHTFPAVLQSSGLYSLSSVVTVPSSSLGTQTYICNVNHKPSNTKVDKKVEPKSCDKTHTCPPCPAPELLGGPSVFLFPPKPKDTLMISRTPEVTCVVVDVSHEDPEVKFNWYVDGVEVHNAKTKPREEQYNSTYRVVSVLTVLHQDWLNGKEYKCKVSNKALPAPIEKTISKAKGQPREPQVYTLPPSREEMTKNQVSLTCLVKGFYPSDIAVEWESNGQPENNYKTTPPVLDSDGSFFLYSKLTVDKSRWQQGNVFSCSVMHEALHNHYTQKSLSLSPG

SEQ ID NO: 130 - DNA, 1428 bp, Artificial Sequence
  IgG1 heavy chain
atggaccccaagggcagcctgagctggagaatcctgctgttcctgagcctggccttcgagctgagctacggccaggtgcagcttgtgcagagcggtgcggaggtgaagaagcccggcagcagcgtaaaggtgagctgcaaggccagcggcggtaccttcagcagctacgccatcagctgggtgaggcaggcacccggccaaggcctggagtggatgggcgacatcatccccgtgatcgacaccaccaactacgcccagaagttccaaggcagggtgaccatcaccgccgacgaaagcaccagcaccgcctacatggagctgagcagcctgaggtctgaagacactgccgtgtactactgcgctagggcgagcggctaccccttcggcaggtggttcgacccctggggccagggcaccctggtgaccgtgtcctctgccagcaccaagggccccagcgtgttccctctggcccccagcagcaagagcaccagcggcggaaccgccgccctgggctgcctggtgaaggactacttccccgagcccgtgaccgtgtcctggaacagcggcgctctgaccagcggagtgcacaccttccctgccgtgctgcagagcagcggcctgtactccctgagcagcgtggtgaccgtgcccagcagcagcctgggcacccagacctacatctgcaacgtgaaccacaagccctccaacaccaaggtggacaagaaggtggagcctaagagctgcgacaagacccacacctgccctccctgccccgcccccgagctgctgggcggacccagcgtgttcctgttccctcccaagcccaaggacaccctgatgatcagccgcacccccgaggtgacctgcgtggtggtggacgtgagccacgaggaccccgaggtgaagttcaactggtacgtggacggcgtggaggtgcacaacgccaagaccaagcctcgggaggagcagtacaactccacctaccgcgtggtgagcgtgctgaccgtgctgcaccaggactggctgaacggcaaggagtacaagtgcaaggtgagcaacaaggccctgcccgctcccatcgagaagaccatcagcaaggccaagggccagccccgggagcctcaggtgtacaccctgccccccagccgcgaagagatgaccaagaaccaggtgagcctgacctgcctggtgaagggcttctacccctccgacatcgccgtggagtgggagagcaacggccagcctgagaacaactacaagaccacccctcccgtgctggacagcgacggcagcttcttcctgtacagcaagctgaccgtggacaagtcccggtggcagcagggcaacgtgttcagctgcagcgtgatgcacgaggccctgcacaaccactacacccagaagagcctgagcctgagccccggatagtaa

SEQ ID NO: 131 - protein, 474 aa, Artificial Sequence
  IgG1 heavy chain
MDPKGSLSWRILLFLSLAFELSYGQVQLVQSGAEVKKPGSSVKVSCKASGGTFSSYAISWVRQAPGQGLEWMGDIIPVIDTTNYAQKFQGRVTITADESTSTAYMELSSLRSEDTAVYYCARASGYPFGRWFDPWGQGTLVTVSSASTKGPSVFPLAPSSKSTSGGTAALGCLVKDYFPEPVTVSWNSGALTSGVHTFPAVLQSSGLYSLSSVVTVPSSSLGTQTYICNVNHKPSNTKVDKKVEPKSCDKTHTCPPCPAPELLGGPSVFLFPPKPKDTLMISRTPEVTCVVVDVSHEDPEVKFNWYVDGVEVHNAKTKPREEQYNSTYRVVSVLTVLHQDWLNGKEYKCKVSNKALPAPIEKTISKAKGQPREPQVYTLPPSREEMTKNQVSLTCLVKGFYPSDIAVEWESNGQPENNYKTTPPVLDSDGSFFLYSKLTVDKSRWQQGNVFSCSVMHEALHNHYTQKSLSLSPG

SEQ ID NO: 132 - DNA, 1431 bp, Artificial Sequence
  IgG1 heavy chain
atggaccccaagggcagcctgagctggagaatcctgctgttcctgagcctggccttcgagctgagctacggcgaggtgcagttgctcgagagcggcggtggcctggtgaagcctggcggcagcctgagactgagctgcgctgcgagcggattcaccttcagcagctacgccatgagctgggtgcgacaggcccctggaaagggcctggagtgggtgagcagcattagcagcgacagctactacaagtaccacgccgacagcgtgaagggtaggttcaccatcagcagggacgacagcaagaacaccctgtacctgcagatgaacagcttgaagaccgaggacaccgcagtgtactactgcgccaagggcgcagactacgacttctggagcggctacctggactactggggccagggcaccttggtgaccgtgagctctgccagcaccaagggccccagcgtgttccctctggcccccagcagcaagagcaccagcggcggaaccgccgccctgggctgcctggtgaaggactacttccccgagcccgtgaccgtgtcctggaacagcggcgctctgaccagcggagtgcacaccttccctgccgtgctgcagagcagcggcctgtactccctgagcagcgtggtgaccgtgcccagcagcagcctgggcacccagacctacatctgcaacgtgaaccacaagccctccaacaccaaggtggacaagaaggtggagcctaagagctgcgacaagacccacacctgccctccctgccccgcccccgagctgctgggcggacccagcgtgttcctgttccctcccaagcccaaggacaccctgatgatcagccgcacccccgaggtgacctgcgtggtggtggacgtgagccacgaggaccccgaggtgaagttcaactggtacgtggacggcgtggaggtgcacaacgccaagaccaagcctcgggaggagcagtacaactccacctaccgcgtggtgagcgtgctgaccgtgctgcaccaggactggctgaacggcaaggagtacaagtgcaaggtgagcaacaaggccctgcccgctcccatcgagaagaccatcagcaaggccaagggccagccccgggagcctcaggtgtacaccctgccccccagccgcgaagagatgaccaagaaccaggtgagcctgacctgcctggtgaagggcttctacccctccgacatcgccgtggagtgggagagcaacggccagcctgagaacaactacaagaccacccctcccgtgctggacagcgacggcagcttcttcctgtacagcaagctgaccgtggacaagtcccggtggcagcagggcaacgtgttcagctgcagcgtgatgcacgaggccctgcacaaccactacacccagaagagcctgagcctgagccccggatagtaa

SEQ ID NO: 133 - protein, 475 aa, Artificial Sequence
  IgG1 heavy chain
MDPKGSLSWRILLFLSLAFELSYGEVQLLESGGGLVKPGGSLRLSCAASGFTFSSYAMSWVRQAPGKGLEWVSSISSDSYYKYHADSVKGRFTISRDDSKNTLYLQMNSLKTEDTAVYYCAKGADYDFWSGYLDYWGQGTLVTVSSASTKGPSVFPLAPSSKSTSGGTAALGCLVKDYFPEPVTVSWNSGALTSGVHTFPAVLQSSGLYSLSSVVTVPSSSLGTQTYICNVNHKPSNTKVDKKVEPKSCDKTHTCPPCPAPELLGGPSVFLFPPKPKDTLMISRTPEVTCVVVDVSHEDPEVKFNWYVDGVEVHNAKTKPREEQYNSTYRVVSVLTVLHQDWLNGKEYKCKVSNKALPAPIEKTISKAKGQPREPQVYTLPPSREEMTKNQVSLTCLVKGFYPSDIAVEWESNGQPENNYKTTPPVLDSDGSFFLYSKLTVDKSRWQQGNVFSCSVMHEALHNHYTQKSLSLSPG

SEQ ID NO: 134 - DNA, 1449 bp, Artificial Sequence
  IgG1 heavy chain
atggaccccaagggcagcctgagctggagaatcctgctgttcctgagcctggccttcgagctgagctacggccaggtgcagctggtgcagtctggggccgaagtgaagaagcccggagcaagcgtgaaggtgagctgcaaggccagcggatacacctttaccggctactacatgcactgggtgaggcaggctcccggtcagggcctggagtggatgggcgtgatcaaccccagcggtggcagcaccagttacgcccagaagttccagggccgagtgaccatgaccagggacaccagtaccagcacagtgtacatggagctgagcagcctgaggagcgaggacaccgccgtgtactactgcgccaggggagattactactatggctccggcagcgactattactattattacggcatggacgtgtggggccagggcaccctggtgaccgtgagctctgccagcaccaagggccccagcgtgttccctctggcccccagcagcaagagcaccagcggcggaaccgccgccctgggctgcctggtgaaggactacttccccgagcccgtgaccgtgtcctggaacagcggcgctctgaccagcggagtgcacaccttccctgccgtgctgcagagcagcggcctgtactccctgagcagcgtggtgaccgtgcccagcagcagcctgggcacccagacctacatctgcaacgtgaaccacaagccctccaacaccaaggtggacaagaaggtggagcctaagagctgcgacaagacccacacctgccctccctgccccgcccccgagctgctgggcggacccagcgtgttcctgttccctcccaagcccaaggacaccctgatgatcagccgcacccccgaggtgacctgcgtggtggtggacgtgagccacgaggaccccgaggtgaagttcaactggtacgtggacggcgtggaggtgcacaacgccaagaccaagcctcgggaggagcagtacaactccacctaccgcgtggtgagcgtgctgaccgtgctgcaccaggactggctgaacggcaaggagtacaagtgcaaggtgagcaacaaggccctgcccgctcccatcgagaagaccatcagcaaggccaagggccagccccgggagcctcaggtgtacaccctgccccccagccgcgaagagatgaccaagaaccaggtgagcctgacctgcctggtgaagggcttctacccctccgacatcgccgtggagtgggagagcaacggccagcctgagaacaactacaagaccacccctcccgtgctggacagcgacggcagcttcttcctgtacagcaagctgaccgtggacaagtcccggtggcagcagggcaacgtgttcagctgcagcgtgatgcacgaggccctgcacaaccactacacccagaagagcctgagcctgagccccggatagtaa

SEQ ID NO: 135 - protein, 481 aa, Artificial Sequence
  IgG1 heavy chain
MDPKGSLSWRILLFLSLAFELSYGQVQLVQSGAEVKKPGASVKVSCKASGYTFTGYYMHWVRQAPGQGLEWMGVINPSGGSTSYAQKFQGRVTMTRDTSTSTVYMELSSLRSEDTAVYYCARGDYYYGSGSDYYYYYGMDVWGQGTLVTVSSASTKGPSVFPLAPSSKSTSGGTAALGCLVKDYFPEPVTVSWNSGALTSGVHTFPAVLQSSGLYSLSSVVTVPSSSLGTQTYICNVNHKPSNTKVDKKVEPKSCDKTHTCPPCPAPELLGGPSVFLFPPKPKDTLMISRTPEVTCVVVDVSHEDPEVKFNWYVDGVEVHNAKTKPREEQYNSTYRVVSVLTVLHQDWLNGKEYKCKVSNKALPAPIEKTISKAKGQPREPQVYTLPPSREEMTKNQVSLTCLVKGFYPSDIAVEWESNGQPENNYKTTPPVLDSDGSFFLYSKLTVDKSRWQQGNVFSCSVMHEALHNHYTQKSLSLSPG

SEQ ID NO: 136 - DNA, 1431 bp, Artificial Sequence
  IgG1 heavy chain
atggaccccaagggcagcctgagctggagaatcctgctgttcctgagcctggccttcgagctgagctacggcgaggtgcaactgctcgagagtggtgccgaagtcaagaagcccggcagcagcgtgaaggtgagctgcaaggccagcggtggcacattcagcagctacgccatcagctgggtgaggcaggcccctggtcagggcttggaatggatgggcggcatcatccccatctttggcaccgcaaactacgcccagaagttccagggcagggtgaccatcaccgccgacaagagcaccagcacagcctacatggagctgagcagcctgaggagcgaggataccgccgtgtactactgcgccaggcccaggctggccgtggccggagggtggtacttcgacctgtggggcagaggcaccctggtgaccgttagctctgccagcaccaagggccccagcgtgttccctctggcccccagcagcaagagcaccagcggcggaaccgccgccctgggctgcctggtgaaggactacttccccgagcccgtgaccgtgtcctggaacagcggcgctctgaccagcggagtgcacaccttccctgccgtgctgcagagcagcggcctgtactccctgagcagcgtggtgaccgtgcccagcagcagcctgggcacccagacctacatctgcaacgtgaaccacaagccctccaacaccaaggtggacaagaaggtggagcctaagagctgcgacaagacccacacctgccctccctgccccgcccccgagctgctgggcggacccagcgtgttcctgttccctcccaagcccaaggacaccctgatgatcagccgcacccccgaggtgacctgcgtggtggtggacgtgagccacgaggaccccgaggtgaagttcaactggtacgtggacggcgtggaggtgcacaacgccaagaccaagcctcgggaggagcagtacaactccacctaccgcgtggtgagcgtgctgaccgtgctgcaccaggactggctgaacggcaaggagtacaagtgcaaggtgagcaacaaggccctgcccgctcccatcgagaagaccatcagcaaggccaagggccagccccgggagcctcaggtgtacaccctgccccccagccgcgaagagatgaccaagaaccaggtgagcctgacctgcctggtgaagggcttctacccctccgacatcgccgtggagtgggagagcaacggccagcctgagaacaactacaagaccacccctcccgtgctggacagcgacggcagcttcttcctgtacagcaagctgaccgtggacaagtcccggtggcagcagggcaacgtgttcagctgcagcgtgatgcacgaggccctgcacaaccactacacccagaagagcctgagcctgagccccggatagtaa

SEQ ID NO: 137 - protein, 475 aa, Artificial Sequence
  IgG1 heavy chain
MDPKGSLSWRILLFLSLAFELSYGEVQLLESGAEVKKPGSSVKVSCKASGGTFSSYAISWVRQAPGQGLEWMGGIIPIFGTANYAQKFQGRVTITADKSTSTAYMELSSLRSEDTAVYYCARPRLAVAGGWYFDLWGRGTLVTVSSASTKGPSVFPLAPSSKSTSGGTAALGCLVKDYFPEPVTVSWNSGALTSGVHTFPAVLQSSGLYSLSSVVTVPSSSLGTQTYICNVNHKPSNTKVDKKVEPKSCDKTHTCPPCPAPELLGGPSVFLFPPKPKDTLMISRTPEVTCVVVDVSHEDPEVKFNWYVDGVEVHNAKTKPREEQYNSTYRVVSVLTVLHQDWLNGKEYKCKVSNKALPAPIEKTISKAKGQPREPQVYTLPPSREEMTKNQVSLTCLVKGFYPSDIAVEWESNGQPENNYKTTPPVLDSDGSFFLYSKLTVDKSRWQQGNVFSCSVMHEALHNHYTQKSLSLSPG

SEQ ID NO: 138 - DNA, 1422 bp, Artificial Sequence
  IgG1 heavy chain
atggaccccaagggcagcctgagctggagaatcctgctgttcctgagcctggccttcgagctgagctacggcgaggtccagctgttggagagcggcggtggcgtggtgcagcctggcaggagcctgcgactgagctgtgccgccagcggcttcaccttctccagctactggatgagctgggtaaggcaggcgccagggaagggcctggagtgggtgagcagcatcagtagcgacagcagctataagtactacgcggacagcgtgaagggcaggttcaccatcagcagggacaacagcaagaacaccctgtacctgcagatgaacagcttgagggcagaagacactgccgtgtactactgcgcccgagacggcctgcgctgggacgccttcgacatctggggccagggcacaatggtgactgtgagctctgccagcaccaagggccccagcgtgttccctctggcccccagcagcaagagcaccagcggcggaaccgccgccctgggctgcctggtgaaggactacttccccgagcccgtgaccgtgtcctggaacagcggcgctctgaccagcggagtgcacaccttccctgccgtgctgcagagcagcggcctgtactccctgagcagcgtggtgaccgtgcccagcagcagcctgggcacccagacctacatctgcaacgtgaaccacaagccctccaacaccaaggtggacaagaaggtggagcctaagagctgcgacaagacccacacctgccctccctgccccgcccccgagctgctgggcggacccagcgtgttcctgttccctcccaagcccaaggacaccctgatgatcagccgcacccccgaggtgacctgcgtggtggtggacgtgagccacgaggaccccgaggtgaagttcaactggtacgtggacggcgtggaggtgcacaacgccaagaccaagcctcgggaggagcagtacaactccacctaccgcgtggtgagcgtgctgaccgtgctgcaccaggactggctgaacggcaaggagtacaagtgcaaggtgagcaacaaggccctgcccgctcccatcgagaagaccatcagcaaggccaagggccagccccgggagcctcaggtgtacaccctgccccccagccgcgaagagatgaccaagaaccaggtgagcctgacctgcctggtgaagggcttctacccctccgacatcgccgtggagtgggagagcaacggccagcctgagaacaactacaagaccacccctcccgtgctggacagcgacggcagcttcttcctgtacagcaagctgaccgtggacaagtcccggtggcagcagggcaacgtgttcagctgcagcgtgatgcacgaggccctgcacaaccactacacccagaagagcctgagcctgagccccggatagtaa

SEQ ID NO: 139 - protein, 472 aa, Artificial Sequence
  IgG1 heavy chain
MDPKGSLSWRILLFLSLAFELSYGEVQLLESGGGVVQPGRSLRLSCAASGFTFSSYWMSWVRQAPGKGLEWVSSISSDSSYKYYADSVKGRFTISRDNSKNTLYLQMNSLRAEDTAVYYCARDGLRWDAFDIWGQGTMVTVSSASTKGPSVFPLAPSSKSTSGGTAALGCLVKDYFPEPVTVSWNSGALTSGVHTFPAVLQSSGLYSLSSVVTVPSSSLGTQTYICNVNHKPSNTKVDKKVEPKSCDKTHTCPPCPAPELLGGPSVFLFPPKPKDTLMISRTPEVTCVVVDVSHEDPEVKFNWYVDGVEVHNAKTKPREEQYNSTYRVVSVLTVLHQDWLNGKEYKCKVSNKALPAPIEKTISKAKGQPREPQVYTLPPSREEMTKNQVSLTCLVKGFYPSDIAVEWESNGQPENNYKTTPPVLDSDGSFFLYSKLTVDKSRWQQGNVFSCSVMHEALHNHYTQKSLSLSPG

SEQ ID NO: 140 - DNA, 1440 bp, Artificial Sequence
  IgG1 heavy chain
atggaccccaagggcagcctgagctggagaatcctgctgttcctgagcctggccttcgagctgagctacggccaggtgcagctggtgcagagcggggctgaggtgaagaagcctggcgcaagcgtgaaagtgagctgcaaggccagcggctacaccttcaccgaccactacctgcactgggtgaggcaggcccctggccaaggcctggagtggatgggcatcatcaaccccagcggaggctataccagccacgcccagaagttccagggcagggtgaccatgaccagggacacctccaccagcaccgtgtacatggagctgagcagcctgaggagcgaggacaccgccgtgtattactgcgcccgagataggttcagggagctgctgggcagcaggtactacggcatggacgtgtgggggcaaggcaccaccgtgaccgtgagctctgccagcaccaagggccccagcgtgttccctctggcccccagcagcaagagcaccagcggcggaaccgccgccctgggctgcctggtgaaggactacttccccgagcccgtgaccgtgtcctggaacagcggcgctctgaccagcggagtgcacaccttccctgccgtgctgcagagcagcggcctgtactccctgagcagcgtggtgaccgtgcccagcagcagcctgggcacccagacctacatctgcaacgtgaaccacaagccctccaacaccaaggtggacaagaaggtggagcctaagagctgcgacaagacccacacctgccctccctgccccgcccccgagctgctgggcggacccagcgtgttcctgttccctcccaagcccaaggacaccctgatgatcagccgcacccccgaggtgacctgcgtggtggtggacgtgagccacgaggaccccgaggtgaagttcaactggtacgtggacggcgtggaggtgcacaacgccaagaccaagcctcgggaggagcagtacaactccacctaccgcgtggtgagcgtgctgaccgtgctgcaccaggactggctgaacggcaaggagtacaagtgcaaggtgagcaacaaggccctgcccgctcccatcgagaagaccatcagcaaggccaagggccagccccgggagcctcaggtgtacaccctgccccccagccgcgaagagatgaccaagaaccaggtgagcctgacctgcctggtgaagggcttctacccctccgacatcgccgtggagtgggagagcaacggccagcctgagaacaactacaagaccacccctcccgtgctggacagcgacggcagcttcttcctgtacagcaagctgaccgtggacaagtcccggtggcagcagggcaacgtgttcagctgcagcgtgatgcacgaggccctgcacaaccactacacccagaagagcctgagcctgagccccggatagtaa

SEQ ID NO: 141 - protein, 478 aa, Artificial Sequence
  IgG1 heavy chain
MDPKGSLSWRILLFLSLAFELSYGQVQLVQSGAEVKKPGASVKVSCKASGYTFTDHYLHWVRQAPGQGLEWMGIINPSGGYTSHAQKFQGRVTMTRDTSTSTVYMELSSLRSEDTAVYYCARDRFRELLGSRYYGMDVWGQGTTVTVSSASTKGPSVFPLAPSSKSTSGGTAALGCLVKDYFPEPVTVSWNSGALTSGVHTFPAVLQSSGLYSLSSVVTVPSSSLGTQTYICNVNHKPSNTKVDKKVEPKSCDKTHTCPPCPAPELLGGPSVFLFPPKPKDTLMISRTPEVTCVVVDVSHEDPEVKFNWYVDGVEVHNAKTKPREEQYNSTYRVVSVLTVLHQDWLNGKEYKCKVSNKALPAPIEKTISKAKGQPREPQVYTLPPSREEMTKNQVSLTCLVKGFYPSDIAVEWESNGQPENNYKTTPPVLDSDGSFFLYSKLTVDKSRWQQGNVFSCSVMHEALHNHYTQKSLSLSPG

SEQ ID NO: 142 - DNA, 1428 bp, Artificial Sequence
  IgG1 heavy chain
atggaccccaagggcagcctgagctggagaatcctgctgttcctgagcctggccttcgagctgagctacggccaggtgcagctggtgcagagcggtgcggaggtgaagaagcccggcagcagcgtgaaggtgagctgcaaggccagcggcggtaccttcagcaactacgccatcagctgggtgaggcaggccccaggccagggcctggagtggatgggcggcatcatccccgtgttcggcaccgccacctacgcccagaagttccagggaagggtgaccatcaccgccgacgaaagcactagcactgcctacatggagctgagcagcctgaggagcgaggacacagccgtgtactactgcgccagggttaccgcaatgggcgtgggctggtacttcgacctgtggggcaggggcaccctggtgactgttagctctgccagcaccaagggccccagcgtgttccctctggcccccagcagcaagagcaccagcggcggaaccgccgccctgggctgcctggtgaaggactacttccccgagcccgtgaccgtgtcctggaacagcggcgctctgaccagcggagtgcacaccttccctgccgtgctgcagagcagcggcctgtactccctgagcagcgtggtgaccgtgcccagcagcagcctgggcacccagacctacatctgcaacgtgaaccacaagccctccaacaccaaggtggacaagaaggtggagcctaagagctgcgacaagacccacacctgccctccctgccccgcccccgagctgctgggcggacccagcgtgttcctgttccctcccaagcccaaggacaccctgatgatcagccgcacccccgaggtgacctgcgtggtggtggacgtgagccacgaggaccccgaggtgaagttcaactggtacgtggacggcgtggaggtgcacaacgccaagaccaagcctcgggaggagcagtacaactccacctaccgcgtggtgagcgtgctgaccgtgctgcaccaggactggctgaacggcaaggagtacaagtgcaaggtgagcaacaaggccctgcccgctcccatcgagaagaccatcagcaaggccaagggccagccccgggagcctcaggtgtacaccctgccccccagccgcgaagagatgaccaagaaccaggtgagcctgacctgcctggtgaagggcttctacccctccgacatcgccgtggagtgggagagcaacggccagcctgagaacaactacaagaccacccctcccgtgctggacagcgacggcagcttcttcctgtacagcaagctgaccgtggacaagtcccggtggcagcagggcaacgtgttcagctgcagcgtgatgcacgaggccctgcacaaccactacacccagaagagcctgagcctgagccccggatagtaa

SEQ ID NO: 143 - protein, 474 aa, Artificial Sequence
  IgG1 heavy chain
MDPKGSLSWRILLFLSLAFELSYGQVQLVQSGAEVKKPGSSVKVSCKASGGTFSNYAISWVRQAPGQGLEWMGGIIPVFGTATYAQKFQGRVTITADESTSTAYMELSSLRSEDTAVYYCARVTAMGVGWYFDLWGRGTLVTVSSASTKGPSVFPLAPSSKSTSGGTAALGCLVKDYFPEPVTVSWNSGALTSGVHTFPAVLQSSGLYSLSSVVTVPSSSLGTQTYICNVNHKPSNTKVDKKVEPKSCDKTHTCPPCPAPELLGGPSVFLFPPKPKDTLMISRTPEVTCVVVDVSHEDPEVKFNWYVDGVEVHNAKTKPREEQYNSTYRVVSVLTVLHQDWLNGKEYKCKVSNKALPAPIEKTISKAKGQPREPQVYTLPPSREEMTKNQVSLTCLVKGFYPSDIAVEWESNGQPENNYKTTPPVLDSDGSFFLYSKLTVDKSRWQQGNVFSCSVMHEALHNHYTQKSLSLSPG

SEQ ID NO: 144 - DNA, 1419 bp, Artificial Sequence
  IgG1 heavy chain
atggaccccaagggcagcctgagctggagaatcctgctgttcctgagcctggccttcgagctgagctacggccaagtgcagctggtgcagagtggggccgaggtgaaaaagcccggcagcagcgtgaaggtgagctgcaaggccagcggctacatcttcaccaactattggattcaatgggtgaggcaggctcccggacagggcctggagtggatgggcggcatcatccccatcttcgagaccgcgaactatgcccagaagttccagggtcgcgttaccatcaccgccgacgacagcacaagcaccgcctacatggagctgagcagcctgaggtccgaggacaccgcagtgtactactgcgccaggctcggcgatcgaggcgactttgactactggggccagggcaccctggtgaccgtgagctctgccagcaccaagggccccagcgtgttccctctggcccccagcagcaagagcaccagcggcggaaccgccgccctgggctgcctggtgaaggactacttccccgagcccgtgaccgtgtcctggaacagcggcgctctgaccagcggagtgcacaccttccctgccgtgctgcagagcagcggcctgtactccctgagcagcgtggtgaccgtgcccagcagcagcctgggcacccagacctacatctgcaacgtgaaccacaagccctccaacaccaaggtggacaagaaggtggagcctaagagctgcgacaagacccacacctgccctccctgccccgcccccgagctgctgggcggacccagcgtgttcctgttccctcccaagcccaaggacaccctgatgatcagccgcacccccgaggtgacctgcgtggtggtggacgtgagccacgaggaccccgaggtgaagttcaactggtacgtggacggcgtggaggtgcacaacgccaagaccaagcctcgggaggagcagtacaactccacctaccgcgtggtgagcgtgctgaccgtgctgcaccaggactggctgaacggcaaggagtacaagtgcaaggtgagcaacaaggccctgcccgctcccatcgagaagaccatcagcaaggccaagggccagccccgggagcctcaggtgtacaccctgccccccagccgcgaagagatgaccaagaaccaggtgagcctgacctgcctggtgaagggcttctacccctccgacatcgccgtggagtgggagagcaacggccagcctgagaacaactacaagaccacccctcccgtgctggacagcgacggcagcttcttcctgtacagcaagctgaccgtggacaagtcccggtggcagcagggcaacgtgttcagctgcagcgtgatgcacgaggccctgcacaaccactacacccagaagagcctgagcctgagccccggatagtaa

SEQ ID NO: 145 - protein, 471 aa, Artificial Sequence
  IgG1 heavy chain
MDPKGSLSWRILLFLSLAFELSYGQVQLVQSGAEVKKPGSSVKVSCKASGYIFTNYWIQWVRQAPGQGLEWMGGIIPIFETANYAQKFQGRVTITADDSTSTAYMELSSLRSEDTAVYYCARLGDRGDFDYWGQGTLVTVSSASTKGPSVFPLAPSSKSTSGGTAALGCLVKDYFPEPVTVSWNSGALTSGVHTFPAVLQSSGLYSLSSVVTVPSSSLGTQTYICNVNHKPSNTKVDKKVEPKSCDKTHTCPPCPAPELLGGPSVFLFPPKPKDTLMISRTPEVTCVVVDVSHEDPEVKFNWYVDGVEVHNAKTKPREEQYNSTYRVVSVLTVLHQDWLNGKEYKCKVSNKALPAPIEKTISKAKGQPREPQVYTLPPSREEMTKNQVSLTCLVKGFYPSDIAVEWESNGQPENNYKTTPPVLDSDGSFFLYSKLTVDKSRWQQGNVFSCSVMHEALHNHYTQKSLSLSPG

SEQ ID NO: 146 - DNA, 1434 bp, Artificial Sequence
  IgG1 heavy chain
atggaccccaagggcagcctgagctggagaatcctgctgttcctgagcctggccttcgagctgagctacggccaggtgcagctggtgcaaagcggtgcagaagtgaagaagcccggcagcagcgtaaaggtgagctgcaaggccagtggcggaaccttcagctccgacgccatcaactgggtgaggcaggctcccggacagggcctggagtggatgggcggcatcgtgcccgcgtttggcaccgcaaactacgcccagaagttccagggtagggtgaccatcaccgctgacgagagtaccagcaccgcctacatggagttgagcagcctgaggagcgaggacaccgccgtgtactattgcgccaggagcagcagttcctggccatactattactactatatggacgtgtggggcaagggcaccaccgtgaccgtgagctctgccagcaccaagggccccagcgtgttccctctggcccccagcagcaagagcaccagcggcggaaccgccgccctgggctgcctggtgaaggactacttccccgagcccgtgaccgtgtcctggaacagcggcgctctgaccagcggagtgcacaccttccctgccgtgctgcagagcagcggcctgtactccctgagcagcgtggtgaccgtgcccagcagcagcctgggcacccagacctacatctgcaacgtgaaccacaagccctccaacaccaaggtggacaagaaggtggagcctaagagctgcgacaagacccacacctgccctccctgccccgcccccgagctgctgggcggacccagcgtgttcctgttccctcccaagcccaaggacaccctgatgatcagccgcacccccgaggtgacctgcgtggtggtggacgtgagccacgaggaccccgaggtgaagttcaactggtacgtggacggcgtggaggtgcacaacgccaagaccaagcctcgggaggagcagtacaactccacctaccgcgtggtgagcgtgctgaccgtgctgcaccaggactggctgaacggcaaggagtacaagtgcaaggtgagcaacaaggccctgcccgctcccatcgagaagaccatcagcaaggccaagggccagccccgggagcctcaggtgtacaccctgccccccagccgcgaagagatgaccaagaaccaggtgagcctgacctgcctggtgaagggcttctacccctccgacatcgccgtggagtgggagagcaacggccagcctgagaacaactacaagaccacccctcccgtgctggacagcgacggcagcttcttcctgtacagcaagctgaccgtggacaagtcccggtggcagcagggcaacgtgttcagctgcagcgtgatgcacgaggccctgcacaaccactacacccagaagagcctgagcctgagccccggatagtaa

SEQ ID NO: 147 - protein, 476 aa, Artificial Sequence
  IgG1 heavy chain
MDPKGSLSWRILLFLSLAFELSYGQVQLVQSGAEVKKPGSSVKVSCKASGGTFSSDAINWVRQAPGQGLEWMGGIVPAFGTANYAQKFQGRVTITADESTSTAYMELSSLRSEDTAVYYCARSSSSWPYYYYYMDVWGKGTTVTVSSASTKGPSVFPLAPSSKSTSGGTAALGCLVKDYFPEPVTVSWNSGALTSGVHTFPAVLQSSGLYSLSSVVTVPSSSLGTQTYICNVNHKPSNTKVDKKVEPKSCDKTHTCPPCPAPELLGGPSVFLFPPKPKDTLMISRTPEVTCVVVDVSHEDPEVKFNWYVDGVEVHNAKTKPREEQYNSTYRVVSVLTVLHQDWLNGKEYKCKVSNKALPAPIEKTISKAKGQPREPQVYTLPPSREEMTKNQVSLTCLVKGFYPSDIAVEWESNGQPENNYKTTPPVLDSDGSFFLYSKLTVDKSRWQQGNVFSCSVMHEALHNHYTQKSLSLSPG

SEQ ID NO: 148 - DNA, 1416 bp, Artificial Sequence
  IgG1 heavy chain
atggaccccaagggcagcctgagctggagaatcctgctgttcctgagcctggccttcgagctgagctacggccaggtgcagctggtccagagcggagcggaagtaaagaagcccggcagcagcgtgaaggtgagctgcaaggccagcggctacttcttcaccagctacggcatcagctgggtgaggcaggccccaggacagggcctggagtggatgggcggagtgatccccatcagcggcactgccaactatgcccagagcttccaaggcagggtgaccatcacagccgacgagagcaccagcaccgcctacatggagctgagcagcctgaggagcgaggacaccgccgtgtactactgcgccagggacgagaacggggcctttgacatctgggggcagggcaccaccgtgaccgtgagctctgccagcaccaagggccccagcgtgttccctctggcccccagcagcaagagcaccagcggcggaaccgccgccctgggctgcctggtgaaggactacttccccgagcccgtgaccgtgtcctggaacagcggcgctctgaccagcggagtgcacaccttccctgccgtgctgcagagcagcggcctgtactccctgagcagcgtggtgaccgtgcccagcagcagcctgggcacccagacctacatctgcaacgtgaaccacaagccctccaacaccaaggtggacaagaaggtggagcctaagagctgcgacaagacccacacctgccctccctgccccgcccccgagctgctgggcggacccagcgtgttcctgttccctcccaagcccaaggacaccctgatgatcagccgcacccccgaggtgacctgcgtggtggtggacgtgagccacgaggaccccgaggtgaagttcaactggtacgtggacggcgtggaggtgcacaacgccaagaccaagcctcgggaggagcagtacaactccacctaccgcgtggtgagcgtgctgaccgtgctgcaccaggactggctgaacggcaaggagtacaagtgcaaggtgagcaacaaggccctgcccgctcccatcgagaagaccatcagcaaggccaagggccagccccgggagcctcaggtgtacaccctgccccccagccgcgaagagatgaccaagaaccaggtgagcctgacctgcctggtgaagggcttctacccctccgacatcgccgtggagtgggagagcaacggccagcctgagaacaactacaagaccacccctcccgtgctggacagcgacggcagcttcttcctgtacagcaagctgaccgtggacaagtcccggtggcagcagggcaacgtgttcagctgcagcgtgatgcacgaggccctgcacaaccactacacccagaagagcctgagcctgagccccggatagtaa

SEQ ID NO: 149 - protein, 470 aa, Artificial Sequence
  IgG1 heavy chain
MDPKGSLSWRILLFLSLAFELSYGQVQLVQSGAEVKKPGSSVKVSCKASGYFFTSYGISWVRQAPGQGLEWMGGVIPISGTANYAQSFQGRVTITADESTSTAYMELSSLRSEDTAVYYCARDENGAFDIWGQGTTVTVSSASTKGPSVFPLAPSSKSTSGGTAALGCLVKDYFPEPVTVSWNSGALTSGVHTFPAVLQSSGLYSLSSVVTVPSSSLGTQTYICNVNHKPSNTKVDKKVEPKSCDKTHTCPPCPAPELLGGPSVFLFPPKPKDTLMISRTPEVTCVVVDVSHEDPEVKFNWYVDGVEVHNAKTKPREEQYNSTYRVVSVLTVLHQDWLNGKEYKCKVSNKALPAPIEKTISKAKGQPREPQVYTLPPSREEMTKNQVSLTCLVKGFYPSDIAVEWESNGQPENNYKTTPPVLDSDGSFFLYSKLTVDKSRWQQGNVFSCSVMHEALHNHYTQKSLSLSPG

SEQ ID NO: 150 - DNA, 1413 bp, Artificial Sequence
  IgG1 heavy chain
atggaccccaagggcagcctgagctggagaatcctgctgttcctgagcctggccttcgagctgagctacggccaggtgcagctggtgcaaagtggcgccgaagtgaagaagcccggctcaagcgtgaaagtgagctgcaaggccagcggcggaaccttcagcagctacgccatcagctgggtgaggcaagcccctggccaaggcctggagtggatgggcggcatcatccccatcttcggcactgccaactacgcccagaagttccagggcagggtgaccatcaccgcggatgagagcacctcaaccgcctacatggagctgagcagcctgaggagcgaggacaccgccgtgtactactgcgccagggacaaccccgacttcgactactgggggcaaggcaccctggtgaccgtgagctctgccagcaccaagggccccagcgtgttccctctggcccccagcagcaagagcaccagcggcggaaccgccgccctgggctgcctggtgaaggactacttccccgagcccgtgaccgtgtcctggaacagcggcgctctgaccagcggagtgcacaccttccctgccgtgctgcagagcagcggcctgtactccctgagcagcgtggtgaccgtgcccagcagcagcctgggcacccagacctacatctgcaacgtgaaccacaagccctccaacaccaaggtggacaagaaggtggagcctaagagctgcgacaagacccacacctgccctccctgccccgcccccgagctgctgggcggacccagcgtgttcctgttccctcccaagcccaaggacaccctgatgatcagccgcacccccgaggtgacctgcgtggtggtggacgtgagccacgaggaccccgaggtgaagttcaactggtacgtggacggcgtggaggtgcacaacgccaagaccaagcctcgggaggagcagtacaactccacctaccgcgtggtgagcgtgctgaccgtgctgcaccaggactggctgaacggcaaggagtacaagtgcaaggtgagcaacaaggccctgcccgctcccatcgagaagaccatcagcaaggccaagggccagccccgggagcctcaggtgtacaccctgccccccagccgcgaagagatgaccaagaaccaggtgagcctgacctgcctggtgaagggcttctacccctccgacatcgccgtggagtgggagagcaacggccagcctgagaacaactacaagaccacccctcccgtgctggacagcgacggcagcttcttcctgtacagcaagctgaccgtggacaagtcccggtggcagcagggcaacgtgttcagctgcagcgtgatgcacgaggccctgcacaaccactacacccagaagagcctgagcctgagccccggatagtaa

SEQ ID NO: 151 - protein, 469 aa, Artificial Sequence
  IgG1 heavy chain
MDPKGSLSWRILLFLSLAFELSYGQVQLVQSGAEVKKPGSSVKVSCKASGGTFSSYAISWVRQAPGQGLEWMGGIIPIFGTANYAQKFQGRVTITADESTSTAYMELSSLRSEDTAVYYCARDNPDFDYWGQGTLVTVSSASTKGPSVFPLAPSSKSTSGGTAALGCLVKDYFPEPVTVSWNSGALTSGVHTFPAVLQSSGLYSLSSVVTVPSSSLGTQTYICNVNHKPSNTKVDKKVEPKSCDKTHTCPPCPAPELLGGPSVFLFPPKPKDTLMISRTPEVTCVVVDVSHEDPEVKFNWYVDGVEVHNAKTKPREEQYNSTYRVVSVLTVLHQDWLNGKEYKCKVSNKALPAPIEKTISKAKGQPREPQVYTLPPSREEMTKNQVSLTCLVKGFYPSDIAVEWESNGQPENNYKTTPPVLDSDGSFFLYSKLTVDKSRWQQGNVFSCSVMHEALHNHYTQKSLSLSPG

SEQ ID NO: 152 - DNA, 1428 bp, Artificial Sequence
  IgG1 heavy chain
atggaccccaagggcagcctgagctggagaatcctgctgttcctgagcctggccttcgagctgagctacggccaggtgcagctggtgcagagtggggccgaggtgaagaagcccggcagcagcgtgaaggtgagctgcaaggccagcggtggcaccttctcaagcaacgccatcagctgggtgaggcaggcacccggccagggcctggagtggatgggcggcatcatccccatcttcggcaccgccaactacgcccagaagttccagggcagggtgaccatcaccgcagatgagtcaaccagcaccgcgtacatggagctcagcagcctgaggagcgaggacaccgccgtgtactactgcgccggtagccccaccggcactcccagggtggtgttcgactactggggccaaggcacgttggtgactgtgagcagcgcaagcaccaagggccccagcgtgttccctctggcccccagcagcaagagcaccagcggcggaaccgccgccctgggctgcctggtgaaggactacttccccgagcccgtgaccgtgtcctggaacagcggcgctctgaccagcggagtgcacaccttccctgccgtgctgcagagcagcggcctgtactccctgagcagcgtggtgaccgtgcccagcagcagcctgggcacccagacctacatctgcaacgtgaaccacaagccctccaacaccaaggtggacaagaaggtggagcctaagagctgcgacaagacccacacctgccctccctgccccgcccccgagctgctgggcggacccagcgtgttcctgttccctcccaagcccaaggacaccctgatgatcagccgcacccccgaggtgacctgcgtggtggtggacgtgagccacgaggaccccgaggtgaagttcaactggtacgtggacggcgtggaggtgcacaacgccaagaccaagcctcgggaggagcagtacaactccacctaccgcgtggtgagcgtgctgaccgtgctgcaccaggactggctgaacggcaaggagtacaagtgcaaggtgagcaacaaggccctgcccgctcccatcgagaagaccatcagcaaggccaagggccagccccgggagcctcaggtgtacaccctgccccccagccgcgaagagatgaccaagaaccaggtgagcctgacctgcctggtgaagggcttctacccctccgacatcgccgtggagtgggagagcaacggccagcctgagaacaactacaagaccacccctcccgtgctggacagcgacggcagcttcttcctgtacagcaagctgaccgtggacaagtcccggtggcagcagggcaacgtgttcagctgcagcgtgatgcacgaggccctgcacaaccactacacccagaagagcctgagcctgagccccggatagtaa

SEQ ID NO: 153 - protein, 474 aa, Artificial Sequence
  IgG1 heavy chain
MDPKGSLSWRILLFLSLAFELSYGQVQLVQSGAEVKKPGSSVKVSCKASGGTFSSNAISWVRQAPGQGLEWMGGIIPIFGTANYAQKFQGRVTITADESTSTAYMELSSLRSEDTAVYYCAGSPTGTPRVVFDYWGQGTLVTVSSASTKGPSVFPLAPSSKSTSGGTAALGCLVKDYFPEPVTVSWNSGALTSGVHTFPAVLQSSGLYSLSSVVTVPSSSLGTQTYICNVNHKPSNTKVDKKVEPKSCDKTHTCPPCPAPELLGGPSVFLFPPKPKDTLMISRTPEVTCVVVDVSHEDPEVKFNWYVDGVEVHNAKTKPREEQYNSTYRVVSVLTVLHQDWLNGKEYKCKVSNKALPAPIEKTISKAKGQPREPQVYTLPPSREEMTKNQVSLTCLVKGFYPSDIAVEWESNGQPENNYKTTPPVLDSDGSFFLYSKLTVDKSRWQQGNVFSCSVMHEALHNHYTQKSLSLSPG

SEQ ID NO: 154 - DNA, 1452 bp, Artificial Sequence
  IgG1 heavy chain
atggaccccaagggcagcctgagctggagaatcctgctgttcctgagcctggccttcgagctgagctacggccaggtgcagctggtgcagagcggcgcagaggtgaagaagcccggagcaagcgtgaaagtgagctgcaaggccagcggcggaaccttcagcagctacgccatcagctgggtgaggcaggcaccaggtcagggcctggagtggatgggcaggattaaccccaacagcggaggcaccgtgtatgcccagaagttccagggcagggtgaccatgacacgcgacacctctactagcactgtgtatatggagctgagcagcctgaggagcgaggacaccgccgtgtactactgcgccagggacaccagcatcgccgctaggctcaatcccgactattactactattatggcatggacgtgtggggacagggcaccaccgtgaccgtgagctctgccagcaccaagggccccagcgtgttccctctggcccccagcagcaagagcaccagcggcggaaccgccgccctgggctgcctggtgaaggactacttccccgagcccgtgaccgtgtcctggaacagcggcgctctgaccagcggagtgcacaccttccctgccgtgctgcagagcagcggcctgtactccctgagcagcgtggtgaccgtgcccagcagcagcctgggcacccagacctacatctgcaacgtgaaccacaagccctccaacaccaaggtggacaagaaggtggagcctaagagctgcgacaagacccacacctgccctccctgccccgcccccgagctgctgggcggacccagcgtgttcctgttccctcccaagcccaaggacaccctgatgatcagccgcacccccgaggtgacctgcgtggtggtggacgtgagccacgaggaccccgaggtgaagttcaactggtacgtggacggcgtggaggtgcacaacgccaagaccaagcctcgggaggagcagtacaactccacctaccgcgtggtgagcgtgctgaccgtgctgcaccaggactggctgaacggcaaggagtacaagtgcaaggtgagcaacaaggccctgcccgctcccatcgagaagaccatcagcaaggccaagggccagccccgggagcctcaggtgtacaccctgccccccagccgcgaagagatgaccaagaaccaggtgagcctgacctgcctggtgaagggcttctacccctccgacatcgccgtggagtgggagagcaacggccagcctgagaacaactacaagaccacccctcccgtgctggacagcgacggcagcttcttcctgtacagcaagctgaccgtggacaagtcccggtggcagcagggcaacgtgttcagctgcagcgtgatgcacgaggccctgcacaaccactacacccagaagagcctgagcctgagccccggatagtaa

SEQ ID NO: 155 - protein, 482 aa, Artificial Sequence
  IgG1 heavy chain
MDPKGSLSWRILLFLSLAFELSYGQVQLVQSGAEVKKPGASVKVSCKASGGTFSSYAISWVRQAPGQGLEWMGRINPNSGGTVYAQKFQGRVTMTRDTSTSTVYMELSSLRSEDTAVYYCARDTSIAARLNPDYYYYYGMDVWGQGTTVTVSSASTKGPSVFPLAPSSKSTSGGTAALGCLVKDYFPEPVTVSWNSGALTSGVHTFPAVLQSSGLYSLSSVVTVPSSSLGTQTYICNVNHKPSNTKVDKKVEPKSCDKTHTCPPCPAPELLGGPSVFLFPPKPKDTLMISRTPEVTCVVVDVSHEDPEVKFNWYVDGVEVHNAKTKPREEQYNSTYRVVSVLTVLHQDWLNGKEYKCKVSNKALPAPIEKTISKAKGQPREPQVYTLPPSREEMTKNQVSLTCLVKGFYPSDIAVEWESNGQPENNYKTTPPVLDSDGSFFLYSKLTVDKSRWQQGNVFSCSVMHEALHNHYTQKSLSLSPG

SEQ ID NO: 156 - DNA, 1431 bp, Artificial Sequence
  IgG1 heavy chain
atggaccccaagggcagcctgagctggagaatcctgctgttcctgagcctggccttcgagctgagctacggccaggtgcagctggtgcagagcggggcagaggtgaagaagcccggcagcagcgttaaggtaagctgcaaggccagcgggggaaccttcagcagctacgccatcagctgggtgaggcaggcacccggccagggcctggagtggatgggcggcatcatccccgtggtgggcagccccgactacgcccagaggttccagggcagggtgaccatcactgccgacgagagcacaagcaccgcctacatggagctgagcagcctgaggagcgaggacaccgccgtgtactactgcgccaggcacagcatcgtgggcgccaccgccaccagcatggacgtgtggggcaagggcaccaccgtgaccgtgagctctgccagcaccaagggccccagcgtgttccctctggcccccagcagcaagagcaccagcggcggaaccgccgccctgggctgcctggtgaaggactacttccccgagcccgtgaccgtgtcctggaacagcggcgctctgaccagcggagtgcacaccttccctgccgtgctgcagagcagcggcctgtactccctgagcagcgtggtgaccgtgcccagcagcagcctgggcacccagacctacatctgcaacgtgaaccacaagccctccaacaccaaggtggacaagaaggtggagcctaagagctgcgacaagacccacacctgccctccctgccccgcccccgagctgctgggcggacccagcgtgttcctgttccctcccaagcccaaggacaccctgatgatcagccgcacccccgaggtgacctgcgtggtggtggacgtgagccacgaggaccccgaggtgaagttcaactggtacgtggacggcgtggaggtgcacaacgccaagaccaagcctcgggaggagcagtacaactccacctaccgcgtggtgagcgtgctgaccgtgctgcaccaggactggctgaacggcaaggagtacaagtgcaaggtgagcaacaaggccctgcccgctcccatcgagaagaccatcagcaaggccaagggccagccccgggagcctcaggtgtacaccctgccccccagccgcgaagagatgaccaagaaccaggtgagcctgacctgcctggtgaagggcttctacccctccgacatcgccgtggagtgggagagcaacggccagcctgagaacaactacaagaccacccctcccgtgctggacagcgacggcagcttcttcctgtacagcaagctgaccgtggacaagtcccggtggcagcagggcaacgtgttcagctgcagcgtgatgcacgaggccctgcacaaccactacacccagaagagcctgagcctgagccccggatagtaa

SEQ ID NO: 157 - protein, 475 aa, Artificial Sequence
  IgG1 heavy chain
MDPKGSLSWRILLFLSLAFELSYGQVQLVQSGAEVKKPGSSVKVSCKASGGTFSSYAISWVRQAPGQGLEWMGGIIPVVGSPDYAQRFQGRVTITADESTSTAYMELSSLRSEDTAVYYCARHSIVGATATSMDVWGKGTTVTVSSASTKGPSVFPLAPSSKSTSGGTAALGCLVKDYFPEPVTVSWNSGALTSGVHTFPAVLQSSGLYSLSSVVTVPSSSLGTQTYICNVNHKPSNTKVDKKVEPKSCDKTHTCPPCPAPELLGGPSVFLFPPKPKDTLMISRTPEVTCVVVDVSHEDPEVKFNWYVDGVEVHNAKTKPREEQYNSTYRVVSVLTVLHQDWLNGKEYKCKVSNKALPAPIEKTISKAKGQPREPQVYTLPPSREEMTKNQVSLTCLVKGFYPSDIAVEWESNGQPENNYKTTPPVLDSDGSFFLYSKLTVDKSRWQQGNVFSCSVMHEALHNHYTQKSLSLSPG

SEQ ID NO: 158 - DNA, 1440 bp, Artificial Sequence
  IgG1 heavy chain
atggaccccaagggcagcctgagctggagaatcctgctgttcctgagcctggccttcgagctgagctacggccaggtgcaactggtgcagagcggtgcggaggtgaagaagcccggtgccagcgtgaaggtgagctgcaaggccagcggctacacctttagcgactactacgtgcactgggtgaggcaggctcctggacagggcctggagtggatgggctggatcagcgcatacaacggcaacaccaactacgcccagaagctgcagggcagggtgaccatgaccagggacaccagcactagcaccgtgtatatggagctgagcagcctgaggagcgaggacaccgccgtgtactactgcgccagggggagcttggacatctggttcagggagcccggagtgtacatggacgtgtggggcaagggcaccaccgtgaccgtgagctctgccagcaccaagggccccagcgtgttccctctggcccccagcagcaagagcaccagcggcggaaccgccgccctgggctgcctggtgaaggactacttccccgagcccgtgaccgtgtcctggaacagcggcgctctgaccagcggagtgcacaccttccctgccgtgctgcagagcagcggcctgtactccctgagcagcgtggtgaccgtgcccagcagcagcctgggcacccagacctacatctgcaacgtgaaccacaagccctccaacaccaaggtggacaagaaggtggagcctaagagctgcgacaagacccacacctgccctccctgccccgcccccgagctgctgggcggacccagcgtgttcctgttccctcccaagcccaaggacaccctgatgatcagccgcacccccgaggtgacctgcgtggtggtggacgtgagccacgaggaccccgaggtgaagttcaactggtacgtggacggcgtggaggtgcacaacgccaagaccaagcctcgggaggagcagtacaactccacctaccgcgtggtgagcgtgctgaccgtgctgcaccaggactggctgaacggcaaggagtacaagtgcaaggtgagcaacaaggccctgcccgctcccatcgagaagaccatcagcaaggccaagggccagccccgggagcctcaggtgtacaccctgccccccagccgcgaagagatgaccaagaaccaggtgagcctgacctgcctggtgaagggcttctacccctccgacatcgccgtggagtgggagagcaacggccagcctgagaacaactacaagaccacccctcccgtgctggacagcgacggcagcttcttcctgtacagcaagctgaccgtggacaagtcccggtggcagcagggcaacgtgttcagctgcagcgtgatgcacgaggccctgcacaaccactacacccagaagagcctgagcctgagccccggatagtaa

SEQ ID NO: 159 - protein, 478 aa, Artificial Sequence
  IgG1 heavy chain
MDPKGSLSWRILLFLSLAFELSYGQVQLVQSGAEVKKPGASVKVSCKASGYTFSDYYVHWVRQAPGQGLEWMGWISAYNGNTNYAQKLQGRVTMTRDTSTSTVYMELSSLRSEDTAVYYCARGSLDIWFREPGVYMDVWGKGTTVTVSSASTKGPSVFPLAPSSKSTSGGTAALGCLVKDYFPEPVTVSWNSGALTSGVHTFPAVLQSSGLYSLSSVVTVPSSSLGTQTYICNVNHKPSNTKVDKKVEPKSCDKTHTCPPCPAPELLGGPSVFLFPPKPKDTLMISRTPEVTCVVVDVSHEDPEVKFNWYVDGVEVHNAKTKPREEQYNSTYRVVSVLTVLHQDWLNGKEYKCKVSNKALPAPIEKTISKAKGQPREPQVYTLPPSREEMTKNQVSLTCLVKGFYPSDIAVEWESNGQPENNYKTTPPVLDSDGSFFLYSKLTVDKSRWQQGNVFSCSVMHEALHNHYTQKSLSLSPG

SEQ ID NO: 160 - DNA, 1416 bp, Artificial Sequence
  IgG1 heavy chain
atggaccccaagggcagcctgagctggagaatcctgctgttcctgagcctggccttcgagctgagctacggccaggtgcagttggtgcagagtggggcggaggtgaagaagcccggcagcagcgtgaaggtgagctgcaaggccagcggctacgctttcaccgactacttcattcactgggtgaggcaggctcccggccaaggcctggagtggatgggcggcatcatccccatcttcggcaccgctaactacgcccagaagttccagggcagggtgaccatcaccgccgacaagagcaccagcaccgcctacatggagctgagcagcctgaggagcgaggacaccgctgtgtactactgcgccagggtggcctacggcgcattcgacatctggggccagggaacgatggtaaccgtgagctctgccagcaccaagggccccagcgtgttccctctggcccccagcagcaagagcaccagcggcggaaccgccgccctgggctgcctggtgaaggactacttccccgagcccgtgaccgtgtcctggaacagcggcgctctgaccagcggagtgcacaccttccctgccgtgctgcagagcagcggcctgtactccctgagcagcgtggtgaccgtgcccagcagcagcctgggcacccagacctacatctgcaacgtgaaccacaagccctccaacaccaaggtggacaagaaggtggagcctaagagctgcgacaagacccacacctgccctccctgccccgcccccgagctgctgggcggacccagcgtgttcctgttccctcccaagcccaaggacaccctgatgatcagccgcacccccgaggtgacctgcgtggtggtggacgtgagccacgaggaccccgaggtgaagttcaactggtacgtggacggcgtggaggtgcacaacgccaagaccaagcctcgggaggagcagtacaactccacctaccgcgtggtgagcgtgctgaccgtgctgcaccaggactggctgaacggcaaggagtacaagtgcaaggtgagcaacaaggccctgcccgctcccatcgagaagaccatcagcaaggccaagggccagccccgggagcctcaggtgtacaccctgccccccagccgcgaagagatgaccaagaaccaggtgagcctgacctgcctggtgaagggcttctacccctccgacatcgccgtggagtgggagagcaacggccagcctgagaacaactacaagaccacccctcccgtgctggacagcgacggcagcttcttcctgtacagcaagctgaccgtggacaagtcccggtggcagcagggcaacgtgttcagctgcagcgtgatgcacgaggccctgcacaaccactacacccagaagagcctgagcctgagccccggatagtaa

SEQ ID NO: 161 - protein, 470 aa, Artificial Sequence
  IgG1 heavy chain
MDPKGSLSWRILLFLSLAFELSYGQVQLVQSGAEVKKPGSSVKVSCKASGYAFTDYFIHWVRQAPGQGLEWMGGIIPIFGTANYAQKFQGRVTITADKSTSTAYMELSSLRSEDTAVYYCARVAYGAFDIWGQGTMVTVSSASTKGPSVFPLAPSSKSTSGGTAALGCLVKDYFPEPVTVSWNSGALTSGVHTFPAVLQSSGLYSLSSVVTVPSSSLGTQTYICNVNHKPSNTKVDKKVEPKSCDKTHTCPPCPAPELLGGPSVFLFPPKPKDTLMISRTPEVTCVVVDVSHEDPEVKFNWYVDGVEVHNAKTKPREEQYNSTYRVVSVLTVLHQDWLNGKEYKCKVSNKALPAPIEKTISKAKGQPREPQVYTLPPSREEMTKNQVSLTCLVKGFYPSDIAVEWESNGQPENNYKTTPPVLDSDGSFFLYSKLTVDKSRWQQGNVFSCSVMHEALHNHYTQKSLSLSPG

SEQ ID NO: 162 - DNA, 1461 bp, Artificial Sequence
  IgG1 heavy chain
atggaccccaagggcagcctgagctggagaatcctgctgttcctgagcctggccttcgagctgagctacggccaggtgcagctggtgcagagcggagctgaagtgaagaagcccggtgccagcgtgaaggtgagctgcaaggccagcggcggtaccttcagcaactacggcgtgtcatgggtgaggcaggcccctggacagggtctggagtggatgggcggcatcaaccccagcaggggcaccaccacatacgcccagaagttccagggcagggtgaccatgaccagggacaccagtaccagcaccgtgtatatggaactgagcagcctgaggagcgaggacaccgcagtgtactactgcgccaagggcgacatcgtggtagtacccgcagccatgttcagcctgggtcccggctactactattacatggacgtgtggggcaagggaaccacagtgaccgtgagctctgccagcaccaagggccccagcgtgttccctctggcccccagcagcaagagcaccagcggcggaaccgccgccctgggctgcctggtgaaggactacttccccgagcccgtgaccgtgtcctggaacagcggcgctctgaccagcggagtgcacaccttccctgccgtgctgcagagcagcggcctgtactccctgagcagcgtggtgaccgtgcccagcagcagcctgggcacccagacctacatctgcaacgtgaaccacaagccctccaacaccaaggtggacaagaaggtggagcctaagagctgcgacaagacccacacctgccctccctgccccgcccccgagctgctgggcggacccagcgtgttcctgttccctcccaagcccaaggacaccctgatgatcagccgcacccccgaggtgacctgcgtggtggtggacgtgagccacgaggaccccgaggtgaagttcaactggtacgtggacggcgtggaggtgcacaacgccaagaccaagcctcgggaggagcagtacaactccacctaccgcgtggtgagcgtgctgaccgtgctgcaccaggactggctgaacggcaaggagtacaagtgcaaggtgagcaacaaggccctgcccgctcccatcgagaagaccatcagcaaggccaagggccagccccgggagcctcaggtgtacaccctgccccccagccgcgaagagatgaccaagaaccaggtgagcctgacctgcctggtgaagggcttctacccctccgacatcgccgtggagtgggagagcaacggccagcctgagaacaactacaagaccacccctcccgtgctggacagcgacggcagcttcttcctgtacagcaagctgaccgtggacaagtcccggtggcagcagggcaacgtgttcagctgcagcgtgatgcacgaggccctgcacaaccactacacccagaagagcctgagcctgagccccggatagtaa

SEQ ID NO: 163 - protein, 485 aa, Artificial Sequence
  IgG1 heavy chain
MDPKGSLSWRILLFLSLAFELSYGQVQLVQSGAEVKKPGASVKVSCKASGGTFSNYGVSWVRQAPGQGLEWMGGINPSRGTTTYAQKFQGRVTMTRDTSTSTVYMELSSLRSEDTAVYYCAKGDIVVVPAAMFSLGPGYYYYMDVWGKGTTVTVSSASTKGPSVFPLAPSSKSTSGGTAALGCLVKDYFPEPVTVSWNSGALTSGVHTFPAVLQSSGLYSLSSVVTVPSSSLGTQTYICNVNHKPSNTKVDKKVEPKSCDKTHTCPPCPAPELLGGPSVFLFPPKPKDTLMISRTPEVTCVVVDVSHEDPEVKFNWYVDGVEVHNAKTKPREEQYNSTYRVVSVLTVLHQDWLNGKEYKCKVSNKALPAPIEKTISKAKGQPREPQVYTLPPSREEMTKNQVSLTCLVKGFYPSDIAVEWESNGQPENNYKTTPPVLDSDGSFFLYSKLTVDKSRWQQGNVFSCSVMHEALHNHYTQKSLSLSPG

SEQ ID NO: 164 - DNA, 1416 bp, Artificial Sequence
  IgG1 heavy chain
atggaccccaagggcagcctgagctggagaatcctgctgttcctgagcctggccttcgagctgagctacggcgaggttcaactgctcgagagcggtggcggcctggtgcaacccggaggcagcctgaggctgagctgcgccgcaagcggcttcaccttcagcagctatggcatgagctgggtgaggcaggcacccggcaaaggcctggagtggctggccgtgatctggagcgacggcggacacaagtactacgccgacagcgtgaagggcaggttcaccatcagcagggacaacagcaagaacaccctgtacctgcagatgaacagcctgcgggcagaggacaccgccgtgtactactgcgccagggaggtgcgaggctggttcgacccctggggccagggcaccctggtgaccgtgagcagcgccagcaccaagggccccagcgtgttccctctggcccccagcagcaagagcaccagcggcggaaccgccgccctgggctgcctggtgaaggactacttccccgagcccgtgaccgtgtcctggaacagcggcgctctgaccagcggagtgcacaccttccctgccgtgctgcagagcagcggcctgtactccctgagcagcgtggtgaccgtgcccagcagcagcctgggcacccagacctacatctgcaacgtgaaccacaagccctccaacaccaaggtggacaagaaggtggagcctaagagctgcgacaagacccacacctgccctccctgccccgcccccgagctgctgggcggacccagcgtgttcctgttccctcccaagcccaaggacaccctgatgatcagccgcacccccgaggtgacctgcgtggtggtggacgtgagccacgaggaccccgaggtgaagttcaactggtacgtggacggcgtggaggtgcacaacgccaagaccaagcctcgggaggagcagtacaactccacctaccgcgtggtgagcgtgctgaccgtgctgcaccaggactggctgaacggcaaggagtacaagtgcaaggtgagcaacaaggccctgcccgctcccatcgagaagaccatcagcaaggccaagggccagccccgggagcctcaggtgtacaccctgccccccagccgcgaagagatgaccaagaaccaggtgagcctgacctgcctggtgaagggcttctacccctccgacatcgccgtggagtgggagagcaacggccagcctgagaacaactacaagaccacccctcccgtgctggacagcgacggcagcttcttcctgtacagcaagctgaccgtggacaagtcccggtggcagcagggcaacgtgttcagctgcagcgtgatgcacgaggccctgcacaaccactacacccagaagagcctgagcctgagccccggatagtaa

SEQ ID NO: 165 - protein, 470 aa, Artificial Sequence
  IgG1 heavy chain
MDPKGSLSWRILLFLSLAFELSYGEVQLLESGGGLVQPGGSLRLSCAASGFTFSSYGMSWVRQAPGKGLEWLAVIWSDGGHKYYADSVKGRFTISRDNSKNTLYLQMNSLRAEDTAVYYCAREVRGWFDPWGQGTLVTVSSASTKGPSVFPLAPSSKSTSGGTAALGCLVKDYFPEPVTVSWNSGALTSGVHTFPAVLQSSGLYSLSSVVTVPSSSLGTQTYICNVNHKPSNTKVDKKVEPKSCDKTHTCPPCPAPELLGGPSVFLFPPKPKDTLMISRTPEVTCVVVDVSHEDPEVKFNWYVDGVEVHNAKTKPREEQYNSTYRVVSVLTVLHQDWLNGKEYKCKVSNKALPAPIEKTISKAKGQPREPQVYTLPPSREEMTKNQVSLTCLVKGFYPSDIAVEWESNGQPENNYKTTPPVLDSDGSFFLYSKLTVDKSRWQQGNVFSCSVMHEALHNHYTQKSLSLSPG

SEQ ID NO: 166 - DNA, 1413 bp, Artificial Sequence
  IgG1 heavy chain
atggaccccaagggcagcctgagctggagaatcctgctgttcctgagcctggccttcgagctgagctacggcgaggtgcaacttctggagagcggtggcgggctggtgcagccgggaggcagcctgaggctgagctgtgccgccagcggcttcgccttcagcagccactggatgcactgggtgaggcaggccccaggcaaaggcttggagtgggtggccgtgatcagctacgacggcagcaacaagtactacgccgacagcgtgaagggcaggttcaccatcagcagggacaacagcaagaacaccctgtacctgcagatgaacagtctgagggccgaggacaccgccgtgtactactgcgccagggaccgcggcatgatcgattattggggccagggcaccctggtgaccgtgagcagcgccagcaccaagggccccagcgtgttccctctggcccccagcagcaagagcaccagcggcggaaccgccgccctgggctgcctggtgaaggactacttccccgagcccgtgaccgtgtcctggaacagcggcgctctgaccagcggagtgcacaccttccctgccgtgctgcagagcagcggcctgtactccctgagcagcgtggtgaccgtgcccagcagcagcctgggcacccagacctacatctgcaacgtgaaccacaagccctccaacaccaaggtggacaagaaggtggagcctaagagctgcgacaagacccacacctgccctccctgccccgcccccgagctgctgggcggacccagcgtgttcctgttccctcccaagcccaaggacaccctgatgatcagccgcacccccgaggtgacctgcgtggtggtggacgtgagccacgaggaccccgaggtgaagttcaactggtacgtggacggcgtggaggtgcacaacgccaagaccaagcctcgggaggagcagtacaactccacctaccgcgtggtgagcgtgctgaccgtgctgcaccaggactggctgaacggcaaggagtacaagtgcaaggtgagcaacaaggccctgcccgctcccatcgagaagaccatcagcaaggccaagggccagccccgggagcctcaggtgtacaccctgccccccagccgcgaagagatgaccaagaaccaggtgagcctgacctgcctggtgaagggcttctacccctccgacatcgccgtggagtgggagagcaacggccagcctgagaacaactacaagaccacccctcccgtgctggacagcgacggcagcttcttcctgtacagcaagctgaccgtggacaagtcccggtggcagcagggcaacgtgttcagctgcagcgtgatgcacgaggccctgcacaaccactacacccagaagagcctgagcctgagccccggatagtaa

SEQ ID NO: 167 - protein, 469 aa, Artificial Sequence
  IgG1 heavy chain
MDPKGSLSWRILLFLSLAFELSYGEVQLLESGGGLVQPGGSLRLSCAASGFAFSSHWMHWVRQAPGKGLEWVAVISYDGSNKYYADSVKGRFTISRDNSKNTLYLQMNSLRAEDTAVYYCARDRGMIDYWGQGTLVTVSSASTKGPSVFPLAPSSKSTSGGTAALGCLVKDYFPEPVTVSWNSGALTSGVHTFPAVLQSSGLYSLSSVVTVPSSSLGTQTYICNVNHKPSNTKVDKKVEPKSCDKTHTCPPCPAPELLGGPSVFLFPPKPKDTLMISRTPEVTCVVVDVSHEDPEVKFNWYVDGVEVHNAKTKPREEQYNSTYRVVSVLTVLHQDWLNGKEYKCKVSNKALPAPIEKTISKAKGQPREPQVYTLPPSREEMTKNQVSLTCLVKGFYPSDIAVEWESNGQPENNYKTTPPVLDSDGSFFLYSKLTVDKSRWQQGNVFSCSVMHEALHNHYTQKSLSLSPG

SEQ ID NO: 168 - DNA, 1413 bp, Artificial Sequence
  IgG1 heavy chain
atggaccccaagggcagcctgagctggagaatcctgctgttcctgagcctggccttcgagctgagctacggcgaggtgcagctcctggagagcggtggcggtctggtccagcctggcggtagcctgcgcctgagctgtgccgccagcggcttcaccttcagcagctactggatgagctgggtaaggcaggcccctggcaagggcctcgaatgggtgagcagcatttcaagcagtagcagttacatctactacgccgacagcgtgaagggcaggttcaccatcagcagggacaacagcaagaacaccctgtacctgcagatgaacagtctgagggccgaggacaccgccgtgtactactgcgccagggaccagggctggttcgacccctggggccagggcaccctggtgaccgtgagctctgccagcaccaagggccccagcgtgttccctctggcccccagcagcaagagcaccagcggcggaaccgccgccctgggctgcctggtgaaggactacttccccgagcccgtgaccgtgtcctggaacagcggcgctctgaccagcggagtgcacaccttccctgccgtgctgcagagcagcggcctgtactccctgagcagcgtggtgaccgtgcccagcagcagcctgggcacccagacctacatctgcaacgtgaaccacaagccctccaacaccaaggtggacaagaaggtggagcctaagagctgcgacaagacccacacctgccctccctgccccgcccccgagctgctgggcggacccagcgtgttcctgttccctcccaagcccaaggacaccctgatgatcagccgcacccccgaggtgacctgcgtggtggtggacgtgagccacgaggaccccgaggtgaagttcaactggtacgtggacggcgtggaggtgcacaacgccaagaccaagcctcgggaggagcagtacaactccacctaccgcgtggtgagcgtgctgaccgtgctgcaccaggactggctgaacggcaaggagtacaagtgcaaggtgagcaacaaggccctgcccgctcccatcgagaagaccatcagcaaggccaagggccagccccgggagcctcaggtgtacaccctgccccccagccgcgaagagatgaccaagaaccaggtgagcctgacctgcctggtgaagggcttctacccctccgacatcgccgtggagtgggagagcaacggccagcctgagaacaactacaagaccacccctcccgtgctggacagcgacggcagcttcttcctgtacagcaagctgaccgtggacaagtcccggtggcagcagggcaacgtgttcagctgcagcgtgatgcacgaggccctgcacaaccactacacccagaagagcctgagcctgagccccggatagtaa

SEQ ID NO: 169 - protein, 469 aa, Artificial Sequence
  IgG1 heavy chain
MDPKGSLSWRILLFLSLAFELSYGEVQLLESGGGLVQPGGSLRLSCAASGFTFSSYWMSWVRQAPGKGLEWVSSISSSSSYIYYADSVKGRFTISRDNSKNTLYLQMNSLRAEDTAVYYCARDQGWFDPWGQGTLVTVSSASTKGPSVFPLAPSSKSTSGGTAALGCLVKDYFPEPVTVSWNSGALTSGVHTFPAVLQSSGLYSLSSVVTVPSSSLGTQTYICNVNHKPSNTKVDKKVEPKSCDKTHTCPPCPAPELLGGPSVFLFPPKPKDTLMISRTPEVTCVVVDVSHEDPEVKFNWYVDGVEVHNAKTKPREEQYNSTYRVVSVLTVLHQDWLNGKEYKCKVSNKALPAPIEKTISKAKGQPREPQVYTLPPSREEMTKNQVSLTCLVKGFYPSDIAVEWESNGQPENNYKTTPPVLDSDGSFFLYSKLTVDKSRWQQGNVFSCSVMHEALHNHYTQKSLSLSPG

SEQ ID NO: 170 - DNA, 1416 bp, Artificial Sequence
  IgG1 heavy chain
atggaccccaagggcagcctgagctggagaatcctgctgttcctgagcctggccttcgagctgagctacggcgaggtgcaactgctggagagcggtggcggcctggtgcagcacggcggtagtctcaggctgagctgcgcggcaagcggcttcaccttcagcagctactggatgagctgggtgaggcaggctcccggaaagggcctggagtgggtgtctagcatcagcagtagcagttcttacatctactacgccgacagcgtgaagggcaggttcaccatttccagggataacagcaaaaacaccctgtacctgcagatgaacagcctgcgagccgaagacactgcggtgtactactgcgccagggacatcgccggctacttcgacctgtggggcaggggcaccctggtcactgtgagctctgccagcaccaagggccccagcgtgttccctctggcccccagcagcaagagcaccagcggcggaaccgccgccctgggctgcctggtgaaggactacttccccgagcccgtgaccgtgtcctggaacagcggcgctctgaccagcggagtgcacaccttccctgccgtgctgcagagcagcggcctgtactccctgagcagcgtggtgaccgtgcccagcagcagcctgggcacccagacctacatctgcaacgtgaaccacaagccctccaacaccaaggtggacaagaaggtggagcctaagagctgcgacaagacccacacctgccctccctgccccgcccccgagctgctgggcggacccagcgtgttcctgttccctcccaagcccaaggacaccctgatgatcagccgcacccccgaggtgacctgcgtggtggtggacgtgagccacgaggaccccgaggtgaagttcaactggtacgtggacggcgtggaggtgcacaacgccaagaccaagcctcgggaggagcagtacaactccacctaccgcgtggtgagcgtgctgaccgtgctgcaccaggactggctgaacggcaaggagtacaagtgcaaggtgagcaacaaggccctgcccgctcccatcgagaagaccatcagcaaggccaagggccagccccgggagcctcaggtgtacaccctgccccccagccgcgaagagatgaccaagaaccaggtgagcctgacctgcctggtgaagggcttctacccctccgacatcgccgtggagtgggagagcaacggccagcctgagaacaactacaagaccacccctcccgtgctggacagcgacggcagcttcttcctgtacagcaagctgaccgtggacaagtcccggtggcagcagggcaacgtgttcagctgcagcgtgatgcacgaggccctgcacaaccactacacccagaagagcctgagcctgagccccggatagtaa

SEQ ID NO: 171 - protein, 470 aa, Artificial Sequence
  IgG1 heavy chain
MDPKGSLSWRILLFLSLAFELSYGEVQLLESGGGLVQHGGSLRLSCAASGFTFSSYWMSWVRQAPGKGLEWVSSISSSSSYIYYADSVKGRFTISRDNSKNTLYLQMNSLRAEDTAVYYCARDIAGYFDLWGRGTLVTVSSASTKGPSVFPLAPSSKSTSGGTAALGCLVKDYFPEPVTVSWNSGALTSGVHTFPAVLQSSGLYSLSSVVTVPSSSLGTQTYICNVNHKPSNTKVDKKVEPKSCDKTHTCPPCPAPELLGGPSVFLFPPKPKDTLMISRTPEVTCVVVDVSHEDPEVKFNWYVDGVEVHNAKTKPREEQYNSTYRVVSVLTVLHQDWLNGKEYKCKVSNKALPAPIEKTISKAKGQPREPQVYTLPPSREEMTKNQVSLTCLVKGFYPSDIAVEWESNGQPENNYKTTPPVLDSDGSFFLYSKLTVDKSRWQQGNVFSCSVMHEALHNHYTQKSLSLSPG

SEQ ID NO: 172 - DNA, 1413 bp, Artificial Sequence
  IgG1 heavy chain
atggaccccaagggcagcctgagctggagaatcctgctgttcctgagcctggccttcgagctgagctacggccaggtgcagctggtgcagagcggggcagaggtgaagaagccaggcagcagcgtgaaggtgagctgcaaggccagcggctatacctttaccgactactacatgcactgggtgaggcaagcacccgggcaaggactggagtggatgggcgtgatcatccccgtgctgggcgcagcaaagtacgcccagaagttccagggcagggtgaccatcaccgcagacgagtccaccagcaccgcctacatggagctgagcagcctgaggagcgaggacaccgccgtgtactactgcgccaagggctggggcgcattcgacatctggggccaggggacgatggttaccgtgagctctgccagcaccaagggccccagcgtgttccctctggcccccagcagcaagagcaccagcggcggaaccgccgccctgggctgcctggtgaaggactacttccccgagcccgtgaccgtgtcctggaacagcggcgctctgaccagcggagtgcacaccttccctgccgtgctgcagagcagcggcctgtactccctgagcagcgtggtgaccgtgcccagcagcagcctgggcacccagacctacatctgcaacgtgaaccacaagccctccaacaccaaggtggacaagaaggtggagcctaagagctgcgacaagacccacacctgccctccctgccccgcccccgagctgctgggcggacccagcgtgttcctgttccctcccaagcccaaggacaccctgatgatcagccgcacccccgaggtgacctgcgtggtggtggacgtgagccacgaggaccccgaggtgaagttcaactggtacgtggacggcgtggaggtgcacaacgccaagaccaagcctcgggaggagcagtacaactccacctaccgcgtggtgagcgtgctgaccgtgctgcaccaggactggctgaacggcaaggagtacaagtgcaaggtgagcaacaaggccctgcccgctcccatcgagaagaccatcagcaaggccaagggccagccccgggagcctcaggtgtacaccctgccccccagccgcgaagagatgaccaagaaccaggtgagcctgacctgcctggtgaagggcttctacccctccgacatcgccgtggagtgggagagcaacggccagcctgagaacaactacaagaccacccctcccgtgctggacagcgacggcagcttcttcctgtacagcaagctgaccgtggacaagtcccggtggcagcagggcaacgtgttcagctgcagcgtgatgcacgaggccctgcacaaccactacacccagaagagcctgagcctgagccccggatagtaa

SEQ ID NO: 173 - protein, 469 aa, Artificial Sequence
  IgG1 heavy chain
MDPKGSLSWRILLFLSLAFELSYGQVQLVQSGAEVKKPGSSVKVSCKASGYTFTDYYMHWVRQAPGQGLEWMGVIIPVLGAAKYAQKFQGRVTITADESTSTAYMELSSLRSEDTAVYYCAKGWGAFDIWGQGTMVTVSSASTKGPSVFPLAPSSKSTSGGTAALGCLVKDYFPEPVTVSWNSGALTSGVHTFPAVLQSSGLYSLSSVVTVPSSSLGTQTYICNVNHKPSNTKVDKKVEPKSCDKTHTCPPCPAPELLGGPSVFLFPPKPKDTLMISRTPEVTCVVVDVSHEDPEVKFNWYVDGVEVHNAKTKPREEQYNSTYRVVSVLTVLHQDWLNGKEYKCKVSNKALPAPIEKTISKAKGQPREPQVYTLPPSREEMTKNQVSLTCLVKGFYPSDIAVEWESNGQPENNYKTTPPVLDSDGSFFLYSKLTVDKSRWQQGNVFSCSVMHEALHNHYTQKSLSLSPG

SEQ ID NO: 174 - DNA, 1425 bp, Artificial Sequence
  IgG1 heavy chain
atggaccccaagggcagcctgagctggagaatcctgctgttcctgagcctggccttcgagctgagctacggccaggtgcagctggtgcagagcggagccgaggtgaagaagcccggcagctctgtaaaggtgagctgcaaggccagcggctacaccttcagcgaccactacatacactgggtgaggcaggcccctggacagggcctggagtggatgggcggcatcatccccatcctgggcacagccaactacgcccagaagttccaaggcagggtgaccattacggcggacgaatctaccagcaccgcctacatggagctgagcagcctgaggagcgaggacaccgccgtgtactactgcgccaccgacatcgccgttgcgggaactgggttcgactactggggccagggcaccttggtgaccgtgagcagtgccagcaccaagggccccagcgtgttccctctggcccccagcagcaagagcaccagcggcggaaccgccgccctgggctgcctggtgaaggactacttccccgagcccgtgaccgtgtcctggaacagcggcgctctgaccagcggagtgcacaccttccctgccgtgctgcagagcagcggcctgtactccctgagcagcgtggtgaccgtgcccagcagcagcctgggcacccagacctacatctgcaacgtgaaccacaagccctccaacaccaaggtggacaagaaggtggagcctaagagctgcgacaagacccacacctgccctccctgccccgcccccgagctgctgggcggacccagcgtgttcctgttccctcccaagcccaaggacaccctgatgatcagccgcacccccgaggtgacctgcgtggtggtggacgtgagccacgaggaccccgaggtgaagttcaactggtacgtggacggcgtggaggtgcacaacgccaagaccaagcctcgggaggagcagtacaactccacctaccgcgtggtgagcgtgctgaccgtgctgcaccaggactggctgaacggcaaggagtacaagtgcaaggtgagcaacaaggccctgcccgctcccatcgagaagaccatcagcaaggccaagggccagccccgggagcctcaggtgtacaccctgccccccagccgcgaagagatgaccaagaaccaggtgagcctgacctgcctggtgaagggcttctacccctccgacatcgccgtggagtgggagagcaacggccagcctgagaacaactacaagaccacccctcccgtgctggacagcgacggcagcttcttcctgtacagcaagctgaccgtggacaagtcccggtggcagcagggcaacgtgttcagctgcagcgtgatgcacgaggccctgcacaaccactacacccagaagagcctgagcctgagccccggatagtaa

SEQ ID NO: 175 - protein, 473 aa, Artificial Sequence
  IgG1 heavy chain
MDPKGSLSWRILLFLSLAFELSYGQVQLVQSGAEVKKPGSSVKVSCKASGYTFSDHYIHWVRQAPGQGLEWMGGIIPILGTANYAQKFQGRVTITADESTSTAYMELSSLRSEDTAVYYCATDIAVAGTGFDYWGQGTLVTVSSASTKGPSVFPLAPSSKSTSGGTAALGCLVKDYFPEPVTVSWNSGALTSGVHTFPAVLQSSGLYSLSSVVTVPSSSLGTQTYICNVNHKPSNTKVDKKVEPKSCDKTHTCPPCPAPELLGGPSVFLFPPKPKDTLMISRTPEVTCVVVDVSHEDPEVKFNWYVDGVEVHNAKTKPREEQYNSTYRVVSVLTVLHQDWLNGKEYKCKVSNKALPAPIEKTISKAKGQPREPQVYTLPPSREEMTKNQVSLTCLVKGFYPSDIAVEWESNGQPENNYKTTPPVLDSDGSFFLYSKLTVDKSRWQQGNVFSCSVMHEALHNHYTQKSLSLSPG

SEQ ID NO: 176 - DNA, 1419 bp, Artificial Sequence
  IgG1 heavy chain
atggaccccaagggcagcctgagctggagaatcctgctgttcctgagcctggccttcgagctgagctacggcgaggttcagctgctggagagcggtggcggcctggtgcagcccggtggtagcctgcgcctgagctgtgccgccagcgacttcaacttcaagaacgcctggatgagctgggtaaggcaggccccaggtaagggcctggagtgggtgagcgccattagcggcaatggggcaggcacctactacgccgacagcgtgaagggcaggttcaccatcagcagggacaacagcaagaacaccctgtacctgcagatgaacagcctgagagccgaagacaccgccgtgtactactgcgccagggtgggcgagaccggcgcattcgacatctggggacagggcaccaccgtgaccgtgagcagcgccagcaccaagggccccagcgtgttccctctggcccccagcagcaagagcaccagcggcggaaccgccgccctgggctgcctggtgaaggactacttccccgagcccgtgaccgtgtcctggaacagcggcgctctgaccagcggagtgcacaccttccctgccgtgctgcagagcagcggcctgtactccctgagcagcgtggtgaccgtgcccagcagcagcctgggcacccagacctacatctgcaacgtgaaccacaagccctccaacaccaaggtggacaagaaggtggagcctaagagctgcgacaagacccacacctgccctccctgccccgcccccgagctgctgggcggacccagcgtgttcctgttccctcccaagcccaaggacaccctgatgatcagccgcacccccgaggtgacctgcgtggtggtggacgtgagccacgaggaccccgaggtgaagttcaactggtacgtggacggcgtggaggtgcacaacgccaagaccaagcctcgggaggagcagtacaactccacctaccgcgtggtgagcgtgctgaccgtgctgcaccaggactggctgaacggcaaggagtacaagtgcaaggtgagcaacaaggccctgcccgctcccatcgagaagaccatcagcaaggccaagggccagccccgggagcctcaggtgtacaccctgccccccagccgcgaagagatgaccaagaaccaggtgagcctgacctgcctggtgaagggcttctacccctccgacatcgccgtggagtgggagagcaacggccagcctgagaacaactacaagaccacccctcccgtgctggacagcgacggcagcttcttcctgtacagcaagctgaccgtggacaagtcccggtggcagcagggcaacgtgttcagctgcagcgtgatgcacgaggccctgcacaaccactacacccagaagagcctgagcctgagccccggatagtaa

SEQ ID NO: 177 - protein, 471 aa, Artificial Sequence
  IgG1 heavy chain
MDPKGSLSWRILLFLSLAFELSYGEVQLLESGGGLVQPGGSLRLSCAASDFNFKNAWMSWVRQAPGKGLEWVSAISGNGAGTYYADSVKGRFTISRDNSKNTLYLQMNSLRAEDTAVYYCARVGETGAFDIWGQGTTVTVSSASTKGPSVFPLAPSSKSTSGGTAALGCLVKDYFPEPVTVSWNSGALTSGVHTFPAVLQSSGLYSLSSVVTVPSSSLGTQTYICNVNHKPSNTKVDKKVEPKSCDKTHTCPPCPAPELLGGPSVFLFPPKPKDTLMISRTPEVTCVVVDVSHEDPEVKFNWYVDGVEVHNAKTKPREEQYNSTYRVVSVLTVLHQDWLNGKEYKCKVSNKALPAPIEKTISKAKGQPREPQVYTLPPSREEMTKNQVSLTCLVKGFYPSDIAVEWESNGQPENNYKTTPPVLDSDGSFFLYSKLTVDKSRWQQGNVFSCSVMHEALHNHYTQKSLSLSPG

SEQ ID NO: 178 - DNA, 1428 bp, Artificial Sequence
  IgG1 heavy chain
atggaccccaagggcagcctgagctggagaatcctgctgttcctgagcctggccttcgagctgagctacggccaggtgcagctggtgcagagcggagccgaggtgaagaagcccggagcaagcgtgaaagtgagctgcaaggccagcgggggtaccttcagcaactacggattcagctgggtgaggcaggcccctggacagggcctggagtggatgggctggatcagcgcctacaacggcaacaccaattatgcccagcagctccagggcagggtgaccatgaccagggacacaagcaccagtaccgtgtacatggagttgagcagcctgaggagcgaggacaccgccgtgtattactgcgccaagggcgactacggcgagacaggcgtggacttcgactactggggccagggaaccctggtgaccgtgagctctgccagcaccaagggccccagcgtgttccctctggcccccagcagcaagagcaccagcggcggaaccgccgccctgggctgcctggtgaaggactacttccccgagcccgtgaccgtgtcctggaacagcggcgctctgaccagcggagtgcacaccttccctgccgtgctgcagagcagcggcctgtactccctgagcagcgtggtgaccgtgcccagcagcagcctgggcacccagacctacatctgcaacgtgaaccacaagccctccaacaccaaggtggacaagaaggtggagcctaagagctgcgacaagacccacacctgccctccctgccccgcccccgagctgctgggcggacccagcgtgttcctgttccctcccaagcccaaggacaccctgatgatcagccgcacccccgaggtgacctgcgtggtggtggacgtgagccacgaggaccccgaggtgaagttcaactggtacgtggacggcgtggaggtgcacaacgccaagaccaagcctcgggaggagcagtacaactccacctaccgcgtggtgagcgtgctgaccgtgctgcaccaggactggctgaacggcaaggagtacaagtgcaaggtgagcaacaaggccctgcccgctcccatcgagaagaccatcagcaaggccaagggccagccccgggagcctcaggtgtacaccctgccccccagccgcgaagagatgaccaagaaccaggtgagcctgacctgcctggtgaagggcttctacccctccgacatcgccgtggagtgggagagcaacggccagcctgagaacaactacaagaccacccctcccgtgctggacagcgacggcagcttcttcctgtacagcaagctgaccgtggacaagtcccggtggcagcagggcaacgtgttcagctgcagcgtgatgcacgaggccctgcacaaccactacacccagaagagcctgagcctgagccccggatagtaa

SEQ ID NO: 179 - protein, 474 aa, Artificial Sequence
  IgG1 heavy chain
MDPKGSLSWRILLFLSLAFELSYGQVQLVQSGAEVKKPGASVKVSCKASGGTFSNYGFSWVRQAPGQGLEWMGWISAYNGNTNYAQQLQGRVTMTRDTSTSTVYMELSSLRSEDTAVYYCAKGDYGETGVDFDYWGQGTLVTVSSASTKGPSVFPLAPSSKSTSGGTAALGCLVKDYFPEPVTVSWNSGALTSGVHTFPAVLQSSGLYSLSSVVTVPSSSLGTQTYICNVNHKPSNTKVDKKVEPKSCDKTHTCPPCPAPELLGGPSVFLFPPKPKDTLMISRTPEVTCVVVDVSHEDPEVKFNWYVDGVEVHNAKTKPREEQYNSTYRVVSVLTVLHQDWLNGKEYKCKVSNKALPAPIEKTISKAKGQPREPQVYTLPPSREEMTKNQVSLTCLVKGFYPSDIAVEWESNGQPENNYKTTPPVLDSDGSFFLYSKLTVDKSRWQQGNVFSCSVMHEALHNHYTQKSLSLSPG

SEQ ID NO: 180 - DNA, 1428 bp, Artificial Sequence
  IgG1 heavy chain
atggaccccaagggcagcctgagctggagaatcctgctgttcctgagcctggccttcgagctgagctacggccaggtgcagctggtgcagagcggagccgaggtgaagaagcccggcagcagcgtgaaggtgagctgcaaggccagcggtggcacattcagcagctacgccatcagctgggttaggcaggccccaggccagggcctggagtggatgggcggcatcatccccatcttcggtacggccaactacgcacagaagttccagggcagggttaccatcaccgccgacgagagtaccagcactgcctacatggagctgtcaagcctgaggagcgaggacaccgcagtgtactactgcgccagagtcatggtggccggcaccggctactacttcgactactggggacaggggaccctggtgaccgtgagcagcgcaagcaccaagggccccagcgtgttccctctggcccccagcagcaagagcaccagcggcggaaccgccgccctgggctgcctggtgaaggactacttccccgagcccgtgaccgtgtcctggaacagcggcgctctgaccagcggagtgcacaccttccctgccgtgctgcagagcagcggcctgtactccctgagcagcgtggtgaccgtgcccagcagcagcctgggcacccagacctacatctgcaacgtgaaccacaagccctccaacaccaaggtggacaagaaggtggagcctaagagctgcgacaagacccacacctgccctccctgccccgcccccgagctgctgggcggacccagcgtgttcctgttccctcccaagcccaaggacaccctgatgatcagccgcacccccgaggtgacctgcgtggtggtggacgtgagccacgaggaccccgaggtgaagttcaactggtacgtggacggcgtggaggtgcacaacgccaagaccaagcctcgggaggagcagtacaactccacctaccgcgtggtgagcgtgctgaccgtgctgcaccaggactggctgaacggcaaggagtacaagtgcaaggtgagcaacaaggccctgcccgctcccatcgagaagaccatcagcaaggccaagggccagccccgggagcctcaggtgtacaccctgccccccagccgcgaagagatgaccaagaaccaggtgagcctgacctgcctggtgaagggcttctacccctccgacatcgccgtggagtgggagagcaacggccagcctgagaacaactacaagaccacccctcccgtgctggacagcgacggcagcttcttcctgtacagcaagctgaccgtggacaagtcccggtggcagcagggcaacgtgttcagctgcagcgtgatgcacgaggccctgcacaaccactacacccagaagagcctgagcctgagccccggatagtaa

SEQ ID NO: 181 - protein, 474 aa, Artificial Sequence
  IgG1 heavy chain
MDPKGSLSWRILLFLSLAFELSYGQVQLVQSGAEVKKPGSSVKVSCKASGGTFSSYAISWVRQAPGQGLEWMGGIIPIFGTANYAQKFQGRVTITADESTSTAYMELSSLRSEDTAVYYCARVMVAGTGYYFDYWGQGTLVTVSSASTKGPSVFPLAPSSKSTSGGTAALGCLVKDYFPEPVTVSWNSGALTSGVHTFPAVLQSSGLYSLSSVVTVPSSSLGTQTYICNVNHKPSNTKVDKKVEPKSCDKTHTCPPCPAPELLGGPSVFLFPPKPKDTLMISRTPEVTCVVVDVSHEDPEVKFNWYVDGVEVHNAKTKPREEQYNSTYRVVSVLTVLHQDWLNGKEYKCKVSNKALPAPIEKTISKAKGQPREPQVYTLPPSREEMTKNQVSLTCLVKGFYPSDIAVEWESNGQPENNYKTTPPVLDSDGSFFLYSKLTVDKSRWQQGNVFSCSVMHEALHNHYTQKSLSLSPG

SEQ ID NO: 182 - DNA, 1422 bp, Artificial Sequence
  IgG1 heavy chain
atggaccccaagggcagcctgagctggagaatcctgctgttcctgagcctggccttcgagctgagctacggcgaggtgcagttgctcgaaagcggcggtggcctggtgaagcccggaggcagcctgaggctgagctgtgccgccagcgggttcaccttcagcagctactggatgagctgggtgcgccaggcacccggcaagggcctggagtgggtgagcagcataagcagtagcggcaactatatgtactacgccgtcagcgtgaagggcaggttcactatcagccgggacgatagcaagaacaccctgtacctgcagatgaacagcttgaaaacagaggacaccgcagtttactactgcgccaccgagacgtacagctacagcagtatggacgtgtggggccagggcaccaccgtgaccgttagctctgccagcaccaagggccccagcgtgttccctctggcccccagcagcaagagcaccagcggcggaaccgccgccctgggctgcctggtgaaggactacttccccgagcccgtgaccgtgtcctggaacagcggcgctctgaccagcggagtgcacaccttccctgccgtgctgcagagcagcggcctgtactccctgagcagcgtggtgaccgtgcccagcagcagcctgggcacccagacctacatctgcaacgtgaaccacaagccctccaacaccaaggtggacaagaaggtggagcctaagagctgcgacaagacccacacctgccctccctgccccgcccccgagctgctgggcggacccagcgtgttcctgttccctcccaagcccaaggacaccctgatgatcagccgcacccccgaggtgacctgcgtggtggtggacgtgagccacgaggaccccgaggtgaagttcaactggtacgtggacggcgtggaggtgcacaacgccaagaccaagcctcgggaggagcagtacaactccacctaccgcgtggtgagcgtgctgaccgtgctgcaccaggactggctgaacggcaaggagtacaagtgcaaggtgagcaacaaggccctgcccgctcccatcgagaagaccatcagcaaggccaagggccagccccgggagcctcaggtgtacaccctgccccccagccgcgaagagatgaccaagaaccaggtgagcctgacctgcctggtgaagggcttctacccctccgacatcgccgtggagtgggagagcaacggccagcctgagaacaactacaagaccacccctcccgtgctggacagcgacggcagcttcttcctgtacagcaagctgaccgtggacaagtcccggtggcagcagggcaacgtgttcagctgcagcgtgatgcacgaggccctgcacaaccactacacccagaagagcctgagcctgagccccggatagtaa

SEQ ID NO: 183 - protein, 472 aa, Artificial Sequence
  IgG1 heavy chain
MDPKGSLSWRILLFLSLAFELSYGEVQLLESGGGLVKPGGSLRLSCAASGFTFSSYWMSWVRQAPGKGLEWVSSISSSGNYMYYAVSVKGRFTISRDDSKNTLYLQMNSLKTEDTAVYYCATETYSYSSMDVWGQGTTVTVSSASTKGPSVFPLAPSSKSTSGGTAALGCLVKDYFPEPVTVSWNSGALTSGVHTFPAVLQSSGLYSLSSVVTVPSSSLGTQTYICNVNHKPSNTKVDKKVEPKSCDKTHTCPPCPAPELLGGPSVFLFPPKPKDTLMISRTPEVTCVVVDVSHEDPEVKFNWYVDGVEVHNAKTKPREEQYNSTYRVVSVLTVLHQDWLNGKEYKCKVSNKALPAPIEKTISKAKGQPREPQVYTLPPSREEMTKNQVSLTCLVKGFYPSDIAVEWESNGQPENNYKTTPPVLDSDGSFFLYSKLTVDKSRWQQGNVFSCSVMHEALHNHYTQKSLSLSPG

SEQ ID NO: 184 - DNA, 1434 bp, Artificial Sequence
  IgG1 heavy chain
atggaccccaagggcagcctgagctggagaatcctgctgttcctgagcctggccttcgagctgagctacggccaggtgcagctggtgcagagcggagccgaggtgaagaagcccggtgccagcgtaaaggtgagctgcaaggccagcggctacaccttcaccgagaacgagatgcactgggtaaggcaagcccctggccaaggcctggagtggatgggctggatcagcgcctacaacggcgacaccaactacgcccagaagttccaaggcagggtgaccatgaccagggacaccagcactagcacagtgtacatggagctgagcagcctgaggagcgaggacaccgccgtgtactactgcgccaaggaggtgaggctggacgacgatgagatgtggtacttcgacctgtggggcaggggcaccctggtgaccgtgagctctgccagcaccaagggccccagcgtgttccctctggcccccagcagcaagagcaccagcggcggaaccgccgccctgggctgcctggtgaaggactacttccccgagcccgtgaccgtgtcctggaacagcggcgctctgaccagcggagtgcacaccttccctgccgtgctgcagagcagcggcctgtactccctgagcagcgtggtgaccgtgcccagcagcagcctgggcacccagacctacatctgcaacgtgaaccacaagccctccaacaccaaggtggacaagaaggtggagcctaagagctgcgacaagacccacacctgccctccctgccccgcccccgagctgctgggcggacccagcgtgttcctgttccctcccaagcccaaggacaccctgatgatcagccgcacccccgaggtgacctgcgtggtggtggacgtgagccacgaggaccccgaggtgaagttcaactggtacgtggacggcgtggaggtgcacaacgccaagaccaagcctcgggaggagcagtacaactccacctaccgcgtggtgagcgtgctgaccgtgctgcaccaggactggctgaacggcaaggagtacaagtgcaaggtgagcaacaaggccctgcccgctcccatcgagaagaccatcagcaaggccaagggccagccccgggagcctcaggtgtacaccctgccccccagccgcgaagagatgaccaagaaccaggtgagcctgacctgcctggtgaagggcttctacccctccgacatcgccgtggagtgggagagcaacggccagcctgagaacaactacaagaccacccctcccgtgctggacagcgacggcagcttcttcctgtacagcaagctgaccgtggacaagtcccggtggcagcagggcaacgtgttcagctgcagcgtgatgcacgaggccctgcacaaccactacacccagaagagcctgagcctgagccccggatagtaa

SEQ ID NO: 185 - protein, 476 aa, Artificial Sequence
  IgG1 heavy chain
MDPKGSLSWRILLFLSLAFELSYGQVQLVQSGAEVKKPGASVKVSCKASGYTFTENEMHWVRQAPGQGLEWMGWISAYNGDTNYAQKFQGRVTMTRDTSTSTVYMELSSLRSEDTAVYYCAKEVRLDDDEMWYFDLWGRGTLVTVSSASTKGPSVFPLAPSSKSTSGGTAALGCLVKDYFPEPVTVSWNSGALTSGVHTFPAVLQSSGLYSLSSVVTVPSSSLGTQTYICNVNHKPSNTKVDKKVEPKSCDKTHTCPPCPAPELLGGPSVFLFPPKPKDTLMISRTPEVTCVVVDVSHEDPEVKFNWYVDGVEVHNAKTKPREEQYNSTYRVVSVLTVLHQDWLNGKEYKCKVSNKALPAPIEKTISKAKGQPREPQVYTLPPSREEMTKNQVSLTCLVKGFYPSDIAVEWESNGQPENNYKTTPPVLDSDGSFFLYSKLTVDKSRWQQGNVFSCSVMHEALHNHYTQKSLSLSPG

SEQ ID NO: 186 - DNA, 1422 bp, Artificial Sequence
  IgG1 heavy chain
atggaccccaagggcagcctgagctggagaatcctgctgttcctgagcctggccttcgagctgagctacggcgaggtgcagttgctcgagagtggcggaggtctggtgaagccagggggaagcctgaggctgagctgcgcggcaagcggtttcaccttcagcagctactggatgagctgggtgaggcaggcacccggcaagggcctggagtgggtgtcagccatcggcacagctggcgacacctactaccccggcagcgtgaagggcaggttcaccatcagcagggacgacagcaagaacaccctgtacctgcagatgaacagcctgaagaccgaggacaccgccgtgtactactgcgcaatcctgcgaagggacaaggtgtggcccttcgactactggggccagggcaccctggtgaccgtgagcagcgccagcaccaagggccccagcgtgttccctctggcccccagcagcaagagcaccagcggcggaaccgccgccctgggctgcctggtgaaggactacttccccgagcccgtgaccgtgtcctggaacagcggcgctctgaccagcggagtgcacaccttccctgccgtgctgcagagcagcggcctgtactccctgagcagcgtggtgaccgtgcccagcagcagcctgggcacccagacctacatctgcaacgtgaaccacaagccctccaacaccaaggtggacaagaaggtggagcctaagagctgcgacaagacccacacctgccctccctgccccgcccccgagctgctgggcggacccagcgtgttcctgttccctcccaagcccaaggacaccctgatgatcagccgcacccccgaggtgacctgcgtggtggtggacgtgagccacgaggaccccgaggtgaagttcaactggtacgtggacggcgtggaggtgcacaacgccaagaccaagcctcgggaggagcagtacaactccacctaccgcgtggtgagcgtgctgaccgtgctgcaccaggactggctgaacggcaaggagtacaagtgcaaggtgagcaacaaggccctgcccgctcccatcgagaagaccatcagcaaggccaagggccagccccgggagcctcaggtgtacaccctgccccccagccgcgaagagatgaccaagaaccaggtgagcctgacctgcctggtgaagggcttctacccctccgacatcgccgtggagtgggagagcaacggccagcctgagaacaactacaagaccacccctcccgtgctggacagcgacggcagcttcttcctgtacagcaagctgaccgtggacaagtcccggtggcagcagggcaacgtgttcagctgcagcgtgatgcacgaggccctgcacaaccactacacccagaagagcctgagcctgagccccggatagtaa

SEQ ID NO: 187 - protein, 472 aa, Artificial Sequence
  IgG1 heavy chain
MDPKGSLSWRILLFLSLAFELSYGEVQLLESGGGLVKPGGSLRLSCAASGFTFSSYWMSWVRQAPGKGLEWVSAIGTAGDTYYPGSVKGRFTISRDDSKNTLYLQMNSLKTEDTAVYYCAILRRDKVWPFDYWGQGTLVTVSSASTKGPSVFPLAPSSKSTSGGTAALGCLVKDYFPEPVTVSWNSGALTSGVHTFPAVLQSSGLYSLSSVVTVPSSSLGTQTYICNVNHKPSNTKVDKKVEPKSCDKTHTCPPCPAPELLGGPSVFLFPPKPKDTLMISRTPEVTCVVVDVSHEDPEVKFNWYVDGVEVHNAKTKPREEQYNSTYRVVSVLTVLHQDWLNGKEYKCKVSNKALPAPIEKTISKAKGQPREPQVYTLPPSREEMTKNQVSLTCLVKGFYPSDIAVEWESNGQPENNYKTTPPVLDSDGSFFLYSKLTVDKSRWQQGNVFSCSVMHEALHNHYTQKSLSLSPG

SEQ ID NO: 188 - DNA, 1428 bp, Artificial Sequence
  IgG1 heavy chain
atggaccccaagggcagcctgagctggagaatcctgctgttcctgagcctggccttcgagctgagctacggccaggtgcagctggtgcagagcggcgctgaggtgaagaagcccggcagcagcgtgaaggtgagctgcaaggccagtggcggcacgttcagcagctatgccctgagctgggtgaggcaggcccctggccaaggcctggagtggatgggcggcatcatccccatcttcggcacggccaactacgcccagaagttccagggaagggtgaccatcaccgccgacgagtctaccagcaccgcctacatggagctgagcagcctgaggagcgaggacactgccgtttattactgcgccagggcggctgccgctggtaccgcctggtacttcgacctgtggggcaggggcaccctggtgaccgtgagctccgccagcaccaagggccccagcgtgttccctctggcccccagcagcaagagcaccagcggcggaaccgccgccctgggctgcctggtgaaggactacttccccgagcccgtgaccgtgtcctggaacagcggcgctctgaccagcggagtgcacaccttccctgccgtgctgcagagcagcggcctgtactccctgagcagcgtggtgaccgtgcccagcagcagcctgggcacccagacctacatctgcaacgtgaaccacaagccctccaacaccaaggtggacaagaaggtggagcctaagagctgcgacaagacccacacctgccctccctgccccgcccccgagctgctgggcggacccagcgtgttcctgttccctcccaagcccaaggacaccctgatgatcagccgcacccccgaggtgacctgcgtggtggtggacgtgagccacgaggaccccgaggtgaagttcaactggtacgtggacggcgtggaggtgcacaacgccaagaccaagcctcgggaggagcagtacaactccacctaccgcgtggtgagcgtgctgaccgtgctgcaccaggactggctgaacggcaaggagtacaagtgcaaggtgagcaacaaggccctgcccgctcccatcgagaagaccatcagcaaggccaagggccagccccgggagcctcaggtgtacaccctgccccccagccgcgaagagatgaccaagaaccaggtgagcctgacctgcctggtgaagggcttctacccctccgacatcgccgtggagtgggagagcaacggccagcctgagaacaactacaagaccacccctcccgtgctggacagcgacggcagcttcttcctgtacagcaagctgaccgtggacaagtcccggtggcagcagggcaacgtgttcagctgcagcgtgatgcacgaggccctgcacaaccactacacccagaagagcctgagcctgagccccggatagtaa

SEQ ID NO: 189 - protein, 474 aa, Artificial Sequence
  IgG1 heavy chain
MDPKGSLSWRILLFLSLAFELSYGQVQLVQSGAEVKKPGSSVKVSCKASGGTFSSYALSWVRQAPGQGLEWMGGIIPIFGTANYAQKFQGRVTITADESTSTAYMELSSLRSEDTAVYYCARAAAAGTAWYFDLWGRGTLVTVSSASTKGPSVFPLAPSSKSTSGGTAALGCLVKDYFPEPVTVSWNSGALTSGVHTFPAVLQSSGLYSLSSVVTVPSSSLGTQTYICNVNHKPSNTKVDKKVEPKSCDKTHTCPPCPAPELLGGPSVFLFPPKPKDTLMISRTPEVTCVVVDVSHEDPEVKFNWYVDGVEVHNAKTKPREEQYNSTYRVVSVLTVLHQDWLNGKEYKCKVSNKALPAPIEKTISKAKGQPREPQVYTLPPSREEMTKNQVSLTCLVKGFYPSDIAVEWESNGQPENNYKTTPPVLDSDGSFFLYSKLTVDKSRWQQGNVFSCSVMHEALHNHYTQKSLSLSPG

SEQ ID NO: 190 - DNA, 1425 bp, Artificial Sequence
  IgG1 heavy chain
atggaccccaagggcagcctgagctggagaatcctgctgttcctgagcctggccttcgagctgagctacggcgaggttcagctgctggagtccggcggtggtctggtgcagccgggaggtagcctgcggctgagctgcgccgcaagcggcttctcattcagcacctattggatgcactgggtgaggcaggctcccggaaagggcctggagtgggtcagcggcatcagcgggggtgggatctacacctactacgccgacagcgtgaagggcaggttcaccatcagcagggacaacagcaagaacaccctgtacctgcagatgaactccctgagggcagaggacacagcggtgtactactgcgccagcatgacctacggcgactactatggcatggacgtgtggggccagggcaccaccgtcaccgttagcagcgccagcaccaagggccccagcgtgttccctctggcccccagcagcaagagcaccagcggcggaaccgccgccctgggctgcctggtgaaggactacttccccgagcccgtgaccgtgtcctggaacagcggcgctctgaccagcggagtgcacaccttccctgccgtgctgcagagcagcggcctgtactccctgagcagcgtggtgaccgtgcccagcagcagcctgggcacccagacctacatctgcaacgtgaaccacaagccctccaacaccaaggtggacaagaaggtggagcctaagagctgcgacaagacccacacctgccctccctgccccgcccccgagctgctgggcggacccagcgtgttcctgttccctcccaagcccaaggacaccctgatgatcagccgcacccccgaggtgacctgcgtggtggtggacgtgagccacgaggaccccgaggtgaagttcaactggtacgtggacggcgtggaggtgcacaacgccaagaccaagcctcgggaggagcagtacaactccacctaccgcgtggtgagcgtgctgaccgtgctgcaccaggactggctgaacggcaaggagtacaagtgcaaggtgagcaacaaggccctgcccgctcccatcgagaagaccatcagcaaggccaagggccagccccgggagcctcaggtgtacaccctgccccccagccgcgaagagatgaccaagaaccaggtgagcctgacctgcctggtgaagggcttctacccctccgacatcgccgtggagtgggagagcaacggccagcctgagaacaactacaagaccacccctcccgtgctggacagcgacggcagcttcttcctgtacagcaagctgaccgtggacaagtcccggtggcagcagggcaacgtgttcagctgcagcgtgatgcacgaggccctgcacaaccactacacccagaagagcctgagcctgagccccggatagtaa

SEQ ID NO: 191 - protein, 473 aa, Artificial Sequence
  IgG1 heavy chain
MDPKGSLSWRILLFLSLAFELSYGEVQLLESGGGLVQPGGSLRLSCAASGFSFSTYWMHWVRQAPGKGLEWVSGISGGGIYTYYADSVKGRFTISRDNSKNTLYLQMNSLRAEDTAVYYCASMTYGDYYGMDVWGQGTTVTVSSASTKGPSVFPLAPSSKSTSGGTAALGCLVKDYFPEPVTVSWNSGALTSGVHTFPAVLQSSGLYSLSSVVTVPSSSLGTQTYICNVNHKPSNTKVDKKVEPKSCDKTHTCPPCPAPELLGGPSVFLFPPKPKDTLMISRTPEVTCVVVDVSHEDPEVKFNWYVDGVEVHNAKTKPREEQYNSTYRVVSVLTVLHQDWLNGKEYKCKVSNKALPAPIEKTISKAKGQPREPQVYTLPPSREEMTKNQVSLTCLVKGFYPSDIAVEWESNGQPENNYKTTPPVLDSDGSFFLYSKLTVDKSRWQQGNVFSCSVMHEALHNHYTQKSLSLSPG

SEQ ID NO: 192 - DNA, 1425 bp, Artificial Sequence
  IgG1 heavy chain
atggaccccaagggcagcctgagctggagaatcctgctgttcctgagcctggccttcgagctgagctacggccaggtgcagctggtgcagagcggagccgaggtgaagaagcccggcagcagcgtgaaggtgagctgcaaggccagcggcggaaccttcagcaactacgccatcagctgggtgaggcaggctccgggacagggcctggagtggatgggaggcatcatccccatcttcggcaccgcaaactatgcccagaagttccagggaagggtgaccatcaccgccgacgagtcaaccagtaccgcctacatggagttgagcagcctgaggagcgaggacacagccgtgtactactgcgccaaggacctgggcggctggttcaacctgttcgacccctggggccagggcacactggtgaccgtgtctagcgcaagcaccaagggccccagcgtgttccctctggcccccagcagcaagagcaccagcggcggaaccgccgccctgggctgcctggtgaaggactacttccccgagcccgtgaccgtgtcctggaacagcggcgctctgaccagcggagtgcacaccttccctgccgtgctgcagagcagcggcctgtactccctgagcagcgtggtgaccgtgcccagcagcagcctgggcacccagacctacatctgcaacgtgaaccacaagccctccaacaccaaggtggacaagaaggtggagcctaagagctgcgacaagacccacacctgccctccctgccccgcccccgagctgctgggcggacccagcgtgttcctgttccctcccaagcccaaggacaccctgatgatcagccgcacccccgaggtgacctgcgtggtggtggacgtgagccacgaggaccccgaggtgaagttcaactggtacgtggacggcgtggaggtgcacaacgccaagaccaagcctcgggaggagcagtacaactccacctaccgcgtggtgagcgtgctgaccgtgctgcaccaggactggctgaacggcaaggagtacaagtgcaaggtgagcaacaaggccctgcccgctcccatcgagaagaccatcagcaaggccaagggccagccccgggagcctcaggtgtacaccctgccccccagccgcgaagagatgaccaagaaccaggtgagcctgacctgcctggtgaagggcttctacccctccgacatcgccgtggagtgggagagcaacggccagcctgagaacaactacaagaccacccctcccgtgctggacagcgacggcagcttcttcctgtacagcaagctgaccgtggacaagtcccggtggcagcagggcaacgtgttcagctgcagcgtgatgcacgaggccctgcacaaccactacacccagaagagcctgagcctgagccccggatagtaa

SEQ ID NO: 193 - protein, 473 aa, Artificial Sequence
  IgG1 heavy chain
MDPKGSLSWRILLFLSLAFELSYGQVQLVQSGAEVKKPGSSVKVSCKASGGTFSNYAISWVRQAPGQGLEWMGGIIPIFGTANYAQKFQGRVTITADESTSTAYMELSSLRSEDTAVYYCAKDLGGWFNLFDPWGQGTLVTVSSASTKGPSVFPLAPSSKSTSGGTAALGCLVKDYFPEPVTVSWNSGALTSGVHTFPAVLQSSGLYSLSSVVTVPSSSLGTQTYICNVNHKPSNTKVDKKVEPKSCDKTHTCPPCPAPELLGGPSVFLFPPKPKDTLMISRTPEVTCVVVDVSHEDPEVKFNWYVDGVEVHNAKTKPREEQYNSTYRVVSVLTVLHQDWLNGKEYKCKVSNKALPAPIEKTISKAKGQPREPQVYTLPPSREEMTKNQVSLTCLVKGFYPSDIAVEWESNGQPENNYKTTPPVLDSDGSFFLYSKLTVDKSRWQQGNVFSCSVMHEALHNHYTQKSLSLSPG

SEQ ID NO: 194 - DNA, 1431 bp, Artificial Sequence
  IgG1 heavy chain
atggaccccaagggcagcctgagctggagaatcctgctgttcctgagcctggccttcgagctgagctacggccaggtgcagctggttcagagcggagccgaagtgaagaagcccggtgccagcgtgaaggtgagctgcaaggccagcggctacaccttcgccggtcagtacatgcactgggtgaggcaggcccctgggcagggtctggagtggatgggcaacatcaaccccagcggaggtagcaccagctacgcccagaggttccagggccgagtgaccatgaccagggacacctccaccagcactgtgtacatggagctgagcagcctgaggagcgaggacaccgccgtgtactactgcgccaggggagactacagcgagacctactattactatatggacgtgtggggcaagggcaccaccgtgaccgtgagctctgccagcaccaagggccccagcgtgttccctctggcccccagcagcaagagcaccagcggcggaaccgccgccctgggctgcctggtgaaggactacttccccgagcccgtgaccgtgtcctggaacagcggcgctctgaccagcggagtgcacaccttccctgccgtgctgcagagcagcggcctgtactccctgagcagcgtggtgaccgtgcccagcagcagcctgggcacccagacctacatctgcaacgtgaaccacaagccctccaacaccaaggtggacaagaaggtggagcctaagagctgcgacaagacccacacctgccctccctgccccgcccccgagctgctgggcggacccagcgtgttcctgttccctcccaagcccaaggacaccctgatgatcagccgcacccccgaggtgacctgcgtggtggtggacgtgagccacgaggaccccgaggtgaagttcaactggtacgtggacggcgtggaggtgcacaacgccaagaccaagcctcgggaggagcagtacaactccacctaccgcgtggtgagcgtgctgaccgtgctgcaccaggactggctgaacggcaaggagtacaagtgcaaggtgagcaacaaggccctgcccgctcccatcgagaagaccatcagcaaggccaagggccagccccgggagcctcaggtgtacaccctgccccccagccgcgaagagatgaccaagaaccaggtgagcctgacctgcctggtgaagggcttctacccctccgacatcgccgtggagtgggagagcaacggccagcctgagaacaactacaagaccacccctcccgtgctggacagcgacggcagcttcttcctgtacagcaagctgaccgtggacaagtcccggtggcagcagggcaacgtgttcagctgcagcgtgatgcacgaggccctgcacaaccactacacccagaagagcctgagcctgagccccggatagtaa

SEQ ID NO: 195 - protein, 475 aa, Artificial Sequence
  IgG1 heavy chain
MDPKGSLSWRILLFLSLAFELSYGQVQLVQSGAEVKKPGASVKVSCKASGYTFAGQYMHWVRQAPGQGLEWMGNINPSGGSTSYAQRFQGRVTMTRDTSTSTVYMELSSLRSEDTAVYYCARGDYSETYYYYMDVWGKGTTVTVSSASTKGPSVFPLAPSSKSTSGGTAALGCLVKDYFPEPVTVSWNSGALTSGVHTFPAVLQSSGLYSLSSVVTVPSSSLGTQTYICNVNHKPSNTKVDKKVEPKSCDKTHTCPPCPAPELLGGPSVFLFPPKPKDTLMISRTPEVTCVVVDVSHEDPEVKFNWYVDGVEVHNAKTKPREEQYNSTYRVVSVLTVLHQDWLNGKEYKCKVSNKALPAPIEKTISKAKGQPREPQVYTLPPSREEMTKNQVSLTCLVKGFYPSDIAVEWESNGQPENNYKTTPPVLDSDGSFFLYSKLTVDKSRWQQGNVFSCSVMHEALHNHYTQKSLSLSPG

SEQ ID NO: 196 - DNA, 1416 bp, Artificial Sequence
  IgG1 heavy chain
atggaccccaagggcagcctgagctggagaatcctgctgttcctgagcctggccttcgagctgagctacggcgaggttcagctcctggagagcggcggtggtctggtgcagcccggtggcagcctgaggctgagctgcgcggcaagcggcttcaccttcagcagctactggatgagctgggtcaggcaagccccaggaaagggcctggagtgggtgagcagcatctccagcagcggagggtacctgtactacgccgacagcgtgaagggcaggttcaccataagcagggacaacagcaagaacaccctgtacctgcagatgaacagcttgagggccgaggacactgccgtttactactgcgccagggactggggccttacccctgactactggggtcaaggcaccctggtgaccgtgagctctgccagcaccaagggccccagcgtgttccctctggcccccagcagcaagagcaccagcggcggaaccgccgccctgggctgcctggtgaaggactacttccccgagcccgtgaccgtgtcctggaacagcggcgctctgaccagcggagtgcacaccttccctgccgtgctgcagagcagcggcctgtactccctgagcagcgtggtgaccgtgcccagcagcagcctgggcacccagacctacatctgcaacgtgaaccacaagccctccaacaccaaggtggacaagaaggtggagcctaagagctgcgacaagacccacacctgccctccctgccccgcccccgagctgctgggcggacccagcgtgttcctgttccctcccaagcccaaggacaccctgatgatcagccgcacccccgaggtgacctgcgtggtggtggacgtgagccacgaggaccccgaggtgaagttcaactggtacgtggacggcgtggaggtgcacaacgccaagaccaagcctcgggaggagcagtacaactccacctaccgcgtggtgagcgtgctgaccgtgctgcaccaggactggctgaacggcaaggagtacaagtgcaaggtgagcaacaaggccctgcccgctcccatcgagaagaccatcagcaaggccaagggccagccccgggagcctcaggtgtacaccctgccccccagccgcgaagagatgaccaagaaccaggtgagcctgacctgcctggtgaagggcttctacccctccgacatcgccgtggagtgggagagcaacggccagcctgagaacaactacaagaccacccctcccgtgctggacagcgacggcagcttcttcctgtacagcaagctgaccgtggacaagtcccggtggcagcagggcaacgtgttcagctgcagcgtgatgcacgaggccctgcacaaccactacacccagaagagcctgagcctgagccccggatagtaa

SEQ ID NO: 197 - protein, 470 aa, Artificial Sequence
  IgG1 heavy chain
MDPKGSLSWRILLFLSLAFELSYGEVQLLESGGGLVQPGGSLRLSCAASGFTFSSYWMSWVRQAPGKGLEWVSSISSSGGYLYYADSVKGRFTISRDNSKNTLYLQMNSLRAEDTAVYYCARDWGLTPDYWGQGTLVTVSSASTKGPSVFPLAPSSKSTSGGTAALGCLVKDYFPEPVTVSWNSGALTSGVHTFPAVLQSSGLYSLSSVVTVPSSSLGTQTYICNVNHKPSNTKVDKKVEPKSCDKTHTCPPCPAPELLGGPSVFLFPPKPKDTLMISRTPEVTCVVVDVSHEDPEVKFNWYVDGVEVHNAKTKPREEQYNSTYRVVSVLTVLHQDWLNGKEYKCKVSNKALPAPIEKTISKAKGQPREPQVYTLPPSREEMTKNQVSLTCLVKGFYPSDIAVEWESNGQPENNYKTTPPVLDSDGSFFLYSKLTVDKSRWQQGNVFSCSVMHEALHNHYTQKSLSLSPG

SEQ ID NO: 198 - DNA, 1431 bp, Artificial Sequence; identical to SEQ ID NO: 108
  IgG1 heavy chain

SEQ ID NO: 199 - protein, 475 aa, Artificial Sequence; identical to SEQ ID NO: 109
  IgG1 heavy chain

SEQ ID NO: 200 - DNA, 1419 bp, Artificial Sequence
  IgG1 heavy chain
atggaccccaagggcagcctgagctggagaatcctgctgttcctgagcctggccttcgagctgagctacggccaggtgcagctggtgcagagcggagccgaggtgaagaagcccggcagcagcgtgaaggtgagctgcaaggccagcggctacacgttttccgacttcagcatccactgggtgaggcaggccccaggccaggggctggaatggatgggcggcatgctgcccatcagccacattgcccactacgctaggaagttccagggaagggtgaccattaccgccgacgagagcacatccaccgcctacatggagctgagcagcctgagaagcgaggacaccgccgtgtactactgcgcaaggggcggaagctctggctggttcgaggtgtggggccaaggcaccaccgtgaccgttagctctgccagcaccaagggccccagcgtgttccctctggcccccagcagcaagagcaccagcggcggaaccgccgccctgggctgcctggtgaaggactacttccccgagcccgtgaccgtgtcctggaacagcggcgctctgaccagcggagtgcacaccttccctgccgtgctgcagagcagcggcctgtactccctgagcagcgtggtgaccgtgcccagcagcagcctgggcacccagacctacatctgcaacgtgaaccacaagccctccaacaccaaggtggacaagaaggtggagcctaagagctgcgacaagacccacacctgccctccctgccccgcccccgagctgctgggcggacccagcgtgttcctgttccctcccaagcccaaggacaccctgatgatcagccgcacccccgaggtgacctgcgtggtggtggacgtgagccacgaggaccccgaggtgaagttcaactggtacgtggacggcgtggaggtgcacaacgccaagaccaagcctcgggaggagcagtacaactccacctaccgcgtggtgagcgtgctgaccgtgctgcaccaggactggctgaacggcaaggagtacaagtgcaaggtgagcaacaaggccctgcccgctcccatcgagaagaccatcagcaaggccaagggccagccccgggagcctcaggtgtacaccctgccccccagccgcgaagagatgaccaagaaccaggtgagcctgacctgcctggtgaagggcttctacccctccgacatcgccgtggagtgggagagcaacggccagcctgagaacaactacaagaccacccctcccgtgctggacagcgacggcagcttcttcctgtacagcaagctgaccgtggacaagtcccggtggcagcagggcaacgtgttcagctgcagcgtgatgcacgaggccctgcacaaccactacacccagaagagcctgagcctgagccccggatagtaa

SEQ ID NO: 201 - protein, 471 aa, Artificial Sequence
  IgG1 heavy chain
MDPKGSLSWRILLFLSLAFELSYGQVQLVQSGAEVKKPGSSVKVSCKASGYTFSDFSIHWVRQAPGQGLEWMGGMLPISHIAHYARKFQGRVTITADESTSTAYMELSSLRSEDTAVYYCARGGSSGWFEVWGQGTTVTVSSASTKGPSVFPLAPSSKSTSGGTAALGCLVKDYFPEPVTVSWNSGALTSGVHTFPAVLQSSGLYSLSSVVTVPSSSLGTQTYICNVNHKPSNTKVDKKVEPKSCDKTHTCPPCPAPELLGGPSVFLFPPKPKDTLMISRTPEVTCVVVDVSHEDPEVKFNWYVDGVEVHNAKTKPREEQYNSTYRVVSVLTVLHQDWLNGKEYKCKVSNKALPAPIEKTISKAKGQPREPQVYTLPPSREEMTKNQVSLTCLVKGFYPSDIAVEWESNGQPENNYKTTPPVLDSDGSFFLYSKLTVDKSRWQQGNVFSCSVMHEALHNHYTQKSLSLSPG

SEQ ID NO: 202 - DNA, 1410 bp, Artificial Sequence
  IgG1 heavy chain
atggaccccaagggcagcctgagctggagaatcctgctgttcctgagcctggccttcgagctgagctacggcgaggtgcaactgctcgagagcggcggtggccttgtgaaacctggcgggagccttaggctgagctgtgccgccagcggcttcaccttcagcagctactggatgagctgggtgaggcaagcgcctggaaagggcctcgagtgggtcagcgtgatctactctggtggcagcacctactacgccgatagcgtgaagggcaggttcaccatctccagggacgacagcaagaacaccctgtacctgcagatgaacagcctcaagaccgaagacaccgcagtatattactgcgccaggggccttggctggtttgacccctggggccagggcaccctggtgactgtgagcagcgccagcaccaagggccccagcgtgttccctctggcccccagcagcaagagcaccagcggcggaaccgccgccctgggctgcctggtgaaggactacttccccgagcccgtgaccgtgtcctggaacagcggcgctctgaccagcggagtgcacaccttccctgccgtgctgcagagcagcggcctgtactccctgagcagcgtggtgaccgtgcccagcagcagcctgggcacccagacctacatctgcaacgtgaaccacaagccctccaacaccaaggtggacaagaaggtggagcctaagagctgcgacaagacccacacctgccctccctgccccgcccccgagctgctgggcggacccagcgtgttcctgttccctcccaagcccaaggacaccctgatgatcagccgcacccccgaggtgacctgcgtggtggtggacgtgagccacgaggaccccgaggtgaagttcaactggtacgtggacggcgtggaggtgcacaacgccaagaccaagcctcgggaggagcagtacaactccacctaccgcgtggtgagcgtgctgaccgtgctgcaccaggactggctgaacggcaaggagtacaagtgcaaggtgagcaacaaggccctgcccgctcccatcgagaagaccatcagcaaggccaagggccagccccgggagcctcaggtgtacaccctgccccccagccgcgaagagatgaccaagaaccaggtgagcctgacctgcctggtgaagggcttctacccctccgacatcgccgtggagtgggagagcaacggccagcctgagaacaactacaagaccacccctcccgtgctggacagcgacggcagcttcttcctgtacagcaagctgaccgtggacaagtcccggtggcagcagggcaacgtgttcagctgcagcgtgatgcacgaggccctgcacaaccactacacccagaagagcctgagcctgagccccggatagtaa

SEQ ID NO: 203 - protein, 468 aa, Artificial Sequence
  IgG1 heavy chain
MDPKGSLSWRILLFLSLAFELSYGEVQLLESGGGLVKPGGSLRLSCAASGFTFSSYWMSWVRQAPGKGLEWVSVIYSGGSTYYADSVKGRFTISRDDSKNTLYLQMNSLKTEDTAVYYCARGLGWFDPWGQGTLVTVSSASTKGPSVFPLAPSSKSTSGGTAALGCLVKDYFPEPVTVSWNSGALTSGVHTFPAVLQSSGLYSLSSVVTVPSSSLGTQTYICNVNHKPSNTKVDKKVEPKSCDKTHTCPPCPAPELLGGPSVFLFPPKPKDTLMISRTPEVTCVVVDVSHEDPEVKFNWYVDGVEVHNAKTKPREEQYNSTYRVVSVLTVLHQDWLNGKEYKCKVSNKALPAPIEKTISKAKGQPREPQVYTLPPSREEMTKNQVSLTCLVKGFYPSDIAVEWESNGQPENNYKTTPPVLDSDGSFFLYSKLTVDKSRWQQGNVFSCSVMHEALHNHYTQKSLSLSPG

SEQ ID NO: 204 - DNA, 1425 bp, Artificial Sequence
  IgG1 heavy chain
atggaccccaagggcagcctgagctggagaatcctgctgttcctgagcctggccttcgagctgagctacggccaggtgcagttggtgcagagtggggccgaggtgaagaagcccggcagcagcgtgaaggtgagctgcaaggccagtggcgggagcttcagcggccaggccgtgaactgggtgaggcaggctccgggtcagggcttggagtggatgggtggattcgtgagcctgttcggcaccgccaactacgcgcagaagttccaaggccgggtgaccatcaccgccgacgagagcaccagcactgcctacatggagctgagcagcctgaggagcgaagacacggcagtctactactgcgccagggacagggaggggctggggtggtactttgacctgtggggcaggggcacccttgtaaccgtgagttccgccagcaccaagggccccagcgtgttccctctggcccccagcagcaagagcaccagcggcggaaccgccgccctgggctgcctggtgaaggactacttccccgagcccgtgaccgtgtcctggaacagcggcgctctgaccagcggagtgcacaccttccctgccgtgctgcagagcagcggcctgtactccctgagcagcgtggtgaccgtgcccagcagcagcctgggcacccagacctacatctgcaacgtgaaccacaagccctccaacaccaaggtggacaagaaggtggagcctaagagctgcgacaagacccacacctgccctccctgccccgcccccgagctgctgggcggacccagcgtgttcctgttccctcccaagcccaaggacaccctgatgatcagccgcacccccgaggtgacctgcgtggtggtggacgtgagccacgaggaccccgaggtgaagttcaactggtacgtggacggcgtggaggtgcacaacgccaagaccaagcctcgggaggagcagtacaactccacctaccgcgtggtgagcgtgctgaccgtgctgcaccaggactggctgaacggcaaggagtacaagtgcaaggtgagcaacaaggccctgcccgctcccatcgagaagaccatcagcaaggccaagggccagccccgggagcctcaggtgtacaccctgccccccagccgcgaagagatgaccaagaaccaggtgagcctgacctgcctggtgaagggcttctacccctccgacatcgccgtggagtgggagagcaacggccagcctgagaacaactacaagaccacccctcccgtgctggacagcgacggcagcttcttcctgtacagcaagctgaccgtggacaagtcccggtggcagcagggcaacgtgttcagctgcagcgtgatgcacgaggccctgcacaaccactacacccagaagagcctgagcctgagccccggatagtaa

SEQ ID NO: 205 - protein, 473 aa, Artificial Sequence
  IgG1 heavy chain
MDPKGSLSWRILLFLSLAFELSYGQVQLVQSGAEVKKPGSSVKVSCKASGGSFSGQAVNWVRQAPGQGLEWMGGFVSLFGTANYAQKFQGRVTITADESTSTAYMELSSLRSEDTAVYYCARDREGLGWYFDLWGRGTLVTVSSASTKGPSVFPLAPSSKSTSGGTAALGCLVKDYFPEPVTVSWNSGALTSGVHTFPAVLQSSGLYSLSSVVTVPSSSLGTQTYICNVNHKPSNTKVDKKVEPKSCDKTHTCPPCPAPELLGGPSVFLFPPKPKDTLMISRTPEVTCVVVDVSHEDPEVKFNWYVDGVEVHNAKTKPREEQYNSTYRVVSVLTVLHQDWLNGKEYKCKVSNKALPAPIEKTISKAKGQPREPQVYTLPPSREEMTKNQVSLTCLVKGFYPSDIAVEWESNGQPENNYKTTPPVLDSDGSFFLYSKLTVDKSRWQQGNVFSCSVMHEALHNHYTQKSLSLSPG

SEQ ID NO: 206 - DNA, 1431 bp, Artificial Sequence
  IgG1 heavy chain
atggaccccaagggcagcctgagctggagaatcctgctgttcctgagcctggccttcgagctgagctacggccaggtgcagctggtgcagagcggggcagaggtgaagaagcccggcagcagcgtgaaggtgagctgcaaggccagcggcggtaccttctccacctacgctatcagctgggttaggcaggccccaggccagggcctggagtggatgggcggcatcattcccagcttcaacgcccccagctacgcccaaaagttccagggaagggtgaccatcactgcagacaagagcacctccacggcgtatatggagctgagcagcctgaggagcgaggacaccgccgtgtactactgcgccagggtggtgcccgctgccatcgtgggctggtatttcgacctgtggggcaggggaaccttggtgaccgtgagctctgccagcaccaagggccccagcgtgttccctctggcccccagcagcaagagcaccagcggcggaaccgccgccctgggctgcctggtgaaggactacttccccgagcccgtgaccgtgtcctggaacagcggcgctctgaccagcggagtgcacaccttccctgccgtgctgcagagcagcggcctgtactccctgagcagcgtggtgaccgtgcccagcagcagcctgggcacccagacctacatctgcaacgtgaaccacaagccctccaacaccaaggtggacaagaaggtggagcctaagagctgcgacaagacccacacctgccctccctgccccgcccccgagctgctgggcggacccagcgtgttcctgttccctcccaagcccaaggacaccctgatgatcagccgcacccccgaggtgacctgcgtggtggtggacgtgagccacgaggaccccgaggtgaagttcaactggtacgtggacggcgtggaggtgcacaacgccaagaccaagcctcgggaggagcagtacaactccacctaccgcgtggtgagcgtgctgaccgtgctgcaccaggactggctgaacggcaaggagtacaagtgcaaggtgagcaacaaggccctgcccgctcccatcgagaagaccatcagcaaggccaagggccagccccgggagcctcaggtgtacaccctgccccccagccgcgaagagatgaccaagaaccaggtgagcctgacctgcctggtgaagggcttctacccctccgacatcgccgtggagtgggagagcaacggccagcctgagaacaactacaagaccacccctcccgtgctggacagcgacggcagcttcttcctgtacagcaagctgaccgtggacaagtcccggtggcagcagggcaacgtgttcagctgcagcgtgatgcacgaggccctgcacaaccactacacccagaagagcctgagcctgagccccggatagtaa

SEQ ID NO: 207 - protein, 475 aa, Artificial Sequence
  IgG1 heavy chain
MDPKGSLSWRILLFLSLAFELSYGQVQLVQSGAEVKKPGSSVKVSCKASGGTFSTYAISWVRQAPGQGLEWMGGIIPSFNAPSYAQKFQGRVTITADKSTSTAYMELSSLRSEDTAVYYCARVVPAAIVGWYFDLWGRGTLVTVSSASTKGPSVFPLAPSSKSTSGGTAALGCLVKDYFPEPVTVSWNSGALTSGVHTFPAVLQSSGLYSLSSVVTVPSSSLGTQTYICNVNHKPSNTKVDKKVEPKSCDKTHTCPPCPAPELLGGPSVFLFPPKPKDTLMISRTPEVTCVVVDVSHEDPEVKFNWYVDGVEVHNAKTKPREEQYNSTYRVVSVLTVLHQDWLNGKEYKCKVSNKALPAPIEKTISKAKGQPREPQVYTLPPSREEMTKNQVSLTCLVKGFYPSDIAVEWESNGQPENNYKTTPPVLDSDGSFFLYSKLTVDKSRWQQGNVFSCSVMHEALHNHYTQKSLSLSPG

SEQ ID NO: 208 - DNA, 1419 bp, Artificial Sequence
  IgG1 heavy chain
atggaccccaagggcagcctgagctggagaatcctgctgttcctgagcctggccttcgagctgagctacggccaggtgcagctggtgcagagcggagccgaggtgaagaagcccggcagcagcgtgaaggtgagctgcaaggccagtggcggcatcctgaacagctacgccatcacctgggtgaggcaggcgccaggtcaaggcctggagtggatgggcaggatcatccccatcctgggcatcgccaactacgcccagaagttccagggcagggtgaccatcactgccgacgagagcacctccaccgcctacatggagctgagcagcctgaggagcgaggacaccgccgtgtactactgcgtggagaacgagtcaggccccctgttcgactactggggccagggaaccctggtgaccgtgagctctgccagcaccaagggccccagcgtgttccctctggcccccagcagcaagagcaccagcggcggaaccgccgccctgggctgcctggtgaaggactacttccccgagcccgtgaccgtgtcctggaacagcggcgctctgaccagcggagtgcacaccttccctgccgtgctgcagagcagcggcctgtactccctgagcagcgtggtgaccgtgcccagcagcagcctgggcacccagacctacatctgcaacgtgaaccacaagccctccaacaccaaggtggacaagaaggtggagcctaagagctgcgacaagacccacacctgccctccctgccccgcccccgagctgctgggcggacccagcgtgttcctgttccctcccaagcccaaggacaccctgatgatcagccgcacccccgaggtgacctgcgtggtggtggacgtgagccacgaggaccccgaggtgaagttcaactggtacgtggacggcgtggaggtgcacaacgccaagaccaagcctcgggaggagcagtacaactccacctaccgcgtggtgagcgtgctgaccgtgctgcaccaggactggctgaacggcaaggagtacaagtgcaaggtgagcaacaaggccctgcccgctcccatcgagaagaccatcagcaaggccaagggccagccccgggagcctcaggtgtacaccctgccccccagccgcgaagagatgaccaagaaccaggtgagcctgacctgcctggtgaagggcttctacccctccgacatcgccgtggagtgggagagcaacggccagcctgagaacaactacaagaccacccctcccgtgctggacagcgacggcagcttcttcctgtacagcaagctgaccgtggacaagtcccggtggcagcagggcaacgtgttcagctgcagcgtgatgcacgaggccctgcacaaccactacacccagaagagcctgagcctgagccccggatagtaa

SEQ ID NO: 209 - protein, 471 aa, Artificial Sequence
  IgG1 heavy chain
MDPKGSLSWRILLFLSLAFELSYGQVQLVQSGAEVKKPGSSVKVSCKASGGILNSYAITWVRQAPGQGLEWMGRIIPILGIANYAQKFQGRVTITADESTSTAYMELSSLRSEDTAVYYCVENESGPLFDYWGQGTLVTVSSASTKGPSVFPLAPSSKSTSGGTAALGCLVKDYFPEPVTVSWNSGALTSGVHTFPAVLQSSGLYSLSSVVTVPSSSLGTQTYICNVNHKPSNTKVDKKVEPKSCDKTHTCPPCPAPELLGGPSVFLFPPKPKDTLMISRTPEVTCVVVDVSHEDPEVKFNWYVDGVEVHNAKTKPREEQYNSTYRVVSVLTVLHQDWLNGKEYKCKVSNKALPAPIEKTISKAKGQPREPQVYTLPPSREEMTKNQVSLTCLVKGFYPSDIAVEWESNGQPENNYKTTPPVLDSDGSFFLYSKLTVDKSRWQQGNVFSCSVMHEALHNHYTQKSLSLSPG

SEQ ID NO: 210 - DNA, 1446 bp, Artificial Sequence
  IgG1 heavy chain
atggaccccaagggcagcctgagctggagaatcctgctgttcctgagcctggccttcgagctgagctacggccaggtgcagctggtgcagagcggagccgaggtgaagaagcccggcagcagcgtgaaggtgagctgcaaggccagcggctacacgttcactagctacggcataagctgggtgaggcaggccccaggacagggcctggagtggatgggcggcatcatccccatcttcggcaccgccaactacgcccagaagttccagggtagggtgaccattaccgcagacgagagcacctccaccgcctacatggagctgagcagcctgaggagcgaggacaccgccgtgtactactgcgccagggttatggccaggagggacgggtacaacttcaagggcggctggtacttcgacctgtggggcaggggcaccttggtgaccgtgagctctgccagcaccaagggccccagcgtgttccctctggcccccagcagcaagagcaccagcggcggaaccgccgccctgggctgcctggtgaaggactacttccccgagcccgtgaccgtgtcctggaacagcggcgctctgaccagcggagtgcacaccttccctgccgtgctgcagagcagcggcctgtactccctgagcagcgtggtgaccgtgcccagcagcagcctgggcacccagacctacatctgcaacgtgaaccacaagccctccaacaccaaggtggacaagaaggtggagcctaagagctgcgacaagacccacacctgccctccctgccccgcccccgagctgctgggcggacccagcgtgttcctgttccctcccaagcccaaggacaccctgatgatcagccgcacccccgaggtgacctgcgtggtggtggacgtgagccacgaggaccccgaggtgaagttcaactggtacgtggacggcgtggaggtgcacaacgccaagaccaagcctcgggaggagcagtacaactccacctaccgcgtggtgagcgtgctgaccgtgctgcaccaggactggctgaacggcaaggagtacaagtgcaaggtgagcaacaaggccctgcccgctcccatcgagaagaccatcagcaaggccaagggccagccccgggagcctcaggtgtacaccctgccccccagccgcgaagagatgaccaagaaccaggtgagcctgacctgcctggtgaagggcttctacccctccgacatcgccgtggagtgggagagcaacggccagcctgagaacaactacaagaccacccctcccgtgctggacagcgacggcagcttcttcctgtacagcaagctgaccgtggacaagtcccggtggcagcagggcaacgtgttcagctgcagcgtgatgcacgaggccctgcacaaccactacacccagaagagcctgagcctgagccccggatagtaa

SEQ ID NO: 211 - protein, 480 aa, Artificial Sequence
  IgG1 heavy chain
MDPKGSLSWRILLFLSLAFELSYGQVQLVQSGAEVKKPGSSVKVSCKASGYTFTSYGISWVRQAPGQGLEWMGGIIPIFGTANYAQKFQGRVTITADESTSTAYMELSSLRSEDTAVYYCARVMARRDGYNFKGGWYFDLWGRGTLVTVSSASTKGPSVFPLAPSSKSTSGGTAALGCLVKDYFPEPVTVSWNSGALTSGVHTFPAVLQSSGLYSLSSVVTVPSSSLGTQTYICNVNHKPSNTKVDKKVEPKSCDKTHTCPPCPAPELLGGPSVFLFPPKPKDTLMISRTPEVTCVVVDVSHEDPEVKFNWYVDGVEVHNAKTKPREEQYNSTYRVVSVLTVLHQDWLNGKEYKCKVSNKALPAPIEKTISKAKGQPREPQVYTLPPSREEMTKNQVSLTCLVKGFYPSDIAVEWESNGQPENNYKTTPPVLDSDGSFFLYSKLTVDKSRWQQGNVFSCSVMHEALHNHYTQKSLSLSPG

SEQ ID NO: 212 - DNA, 1416 bp, Artificial Sequence
  IgG1 heavy chain
atggaccccaagggcagcctgagctggagaatcctgctgttcctgagcctggccttcgagctgagctacggccaggtgcagctggtgcagagcggcgcagaggtgaagaagcccggaagcagcgtgaaggtgagctgcaaggccagcggtttcagcttcagcacctacggcgtggcctgggtgaggcaggcaccaggacaggggttggaatggatgggcggcttcgtgcccatcatcggcagcgccaactacgcccagaagttccaaggcagggtgaccatcaccgccgacgagagcactagtaccgcctacatggagctgagcagcctgaggagcgaggataccgccgtgtactactgcgccagggactacggaggcaacctggattactggggccagggcaccctggtgaccgtgagctccgcaagcaccaagggccccagcgtgttccctctggcccccagcagcaagagcaccagcggcggaaccgccgccctgggctgcctggtgaaggactacttccccgagcccgtgaccgtgtcctggaacagcggcgctctgaccagcggagtgcacaccttccctgccgtgctgcagagcagcggcctgtactccctgagcagcgtggtgaccgtgcccagcagcagcctgggcacccagacctacatctgcaacgtgaaccacaagccctccaacaccaaggtggacaagaaggtggagcctaagagctgcgacaagacccacacctgccctccctgccccgcccccgagctgctgggcggacccagcgtgttcctgttccctcccaagcccaaggacaccctgatgatcagccgcacccccgaggtgacctgcgtggtggtggacgtgagccacgaggaccccgaggtgaagttcaactggtacgtggacggcgtggaggtgcacaacgccaagaccaagcctcgggaggagcagtacaactccacctaccgcgtggtgagcgtgctgaccgtgctgcaccaggactggctgaacggcaaggagtacaagtgcaaggtgagcaacaaggccctgcccgctcccatcgagaagaccatcagcaaggccaagggccagccccgggagcctcaggtgtacaccctgccccccagccgcgaagagatgaccaagaaccaggtgagcctgacctgcctggtgaagggcttctacccctccgacatcgccgtggagtgggagagcaacggccagcctgagaacaactacaagaccacccctcccgtgctggacagcgacggcagcttcttcctgtacagcaagctgaccgtggacaagtcccggtggcagcagggcaacgtgttcagctgcagcgtgatgcacgaggccctgcacaaccactacacccagaagagcctgagcctgagccccggatagtaa

SEQ ID NO: 213 - protein, 470 aa, Artificial Sequence
  IgG1 heavy chain
MDPKGSLSWRILLFLSLAFELSYGQVQLVQSGAEVKKPGSSVKVSCKASGFSFSTYGVAWVRQAPGQGLEWMGGFVPIIGSANYAQKFQGRVTITADESTSTAYMELSSLRSEDTAVYYCARDYGGNLDYWGQGTLVTVSSASTKGPSVFPLAPSSKSTSGGTAALGCLVKDYFPEPVTVSWNSGALTSGVHTFPAVLQSSGLYSLSSVVTVPSSSLGTQTYICNVNHKPSNTKVDKKVEPKSCDKTHTCPPCPAPELLGGPSVFLFPPKPKDTLMISRTPEVTCVVVDVSHEDPEVKFNWYVDGVEVHNAKTKPREEQYNSTYRVVSVLTVLHQDWLNGKEYKCKVSNKALPAPIEKTISKAKGQPREPQVYTLPPSREEMTKNQVSLTCLVKGFYPSDIAVEWESNGQPENNYKTTPPVLDSDGSFFLYSKLTVDKSRWQQGNVFSCSVMHEALHNHYTQKSLSLSPG

SEQ ID NO: 214 - DNA, 1413 bp, Artificial Sequence
  IgG1 heavy chain
atggaccccaagggcagcctgagctggagaatcctgctgttcctgagcctggccttcgagctgagctacggccaggtgcagctggtgcagagcggtgccgaggtgaagaagcccggcagcagtgtgaaggtgagttgcaaggccagcggcggtagcttcagcagttgggccatctcatgggtgaggcaggcccctggccaaggactggagtggatgggcggcatcatccccctgttcggcacggtgaactacgcccagaagttccagggcagggtgaccatcaccgcagacgagtccaccagcaccgcctacatggagctgagcagcctgaggagcgaggacaccgccgtgtactactgcgccagggacctccccgatatggtgagctgggggcaaggcaccctggtgaccgtgagctctgccagcaccaagggccccagcgtgttccctctggcccccagcagcaagagcaccagcggcggaaccgccgccctgggctgcctggtgaaggactacttccccgagcccgtgaccgtgtcctggaacagcggcgctctgaccagcggagtgcacaccttccctgccgtgctgcagagcagcggcctgtactccctgagcagcgtggtgaccgtgcccagcagcagcctgggcacccagacctacatctgcaacgtgaaccacaagccctccaacaccaaggtggacaagaaggtggagcctaagagctgcgacaagacccacacctgccctccctgccccgcccccgagctgctgggcggacccagcgtgttcctgttccctcccaagcccaaggacaccctgatgatcagccgcacccccgaggtgacctgcgtggtggtggacgtgagccacgaggaccccgaggtgaagttcaactggtacgtggacggcgtggaggtgcacaacgccaagaccaagcctcgggaggagcagtacaactccacctaccgcgtggtgagcgtgctgaccgtgctgcaccaggactggctgaacggcaaggagtacaagtgcaaggtgagcaacaaggccctgcccgctcccatcgagaagaccatcagcaaggccaagggccagccccgggagcctcaggtgtacaccctgccccccagccgcgaagagatgaccaagaaccaggtgagcctgacctgcctggtgaagggcttctacccctccgacatcgccgtggagtgggagagcaacggccagcctgagaacaactacaagaccacccctcccgtgctggacagcgacggcagcttcttcctgtacagcaagctgaccgtggacaagtcccggtggcagcagggcaacgtgttcagctgcagcgtgatgcacgaggccctgcacaaccactacacccagaagagcctgagcctgagccccggatagtaa

SEQ ID NO: 215 - protein, 469 aa, Artificial Sequence
  IgG1 heavy chain
MDPKGSLSWRILLFLSLAFELSYGQVQLVQSGAEVKKPGSSVKVSCKASGGSFSSWAISWVRQAPGQGLEWMGGIIPLFGTVNYAQKFQGRVTITADESTSTAYMELSSLRSEDTAVYYCARDLPDMVSWGQGTLVTVSSASTKGPSVFPLAPSSKSTSGGTAALGCLVKDYFPEPVTVSWNSGALTSGVHTFPAVLQSSGLYSLSSVVTVPSSSLGTQTYICNVNHKPSNTKVDKKVEPKSCDKTHTCPPCPAPELLGGPSVFLFPPKPKDTLMISRTPEVTCVVVDVSHEDPEVKFNWYVDGVEVHNAKTKPREEQYNSTYRVVSVLTVLHQDWLNGKEYKCKVSNKALPAPIEKTISKAKGQPREPQVYTLPPSREEMTKNQVSLTCLVKGFYPSDIAVEWESNGQPENNYKTTPPVLDSDGSFFLYSKLTVDKSRWQQGNVFSCSVMHEALHNHYTQKSLSLSPG

SEQ ID NO: 216 - DNA, 1431 bp, Artificial Sequence; identical to SEQ ID NO: 108
  IgG1 heavy chain

SEQ ID NO: 217 - protein, 475 aa, Artificial Sequence; identical to SEQ ID NO: 109
  IgG1 heavy chain

SEQ ID NO: 218 - DNA, 1419 bp, Artificial Sequence
  IgG1 heavy chain
atggaccccaagggcagcctgagctggagaatcctgctgttcctgagcctggccttcgagctgagctacggcgaggtgcagttgctggagagcggaggcggtctggtgcagccaggcggcagccttaggctgagctgcgccgctagtggcttcaccttcagcgactactacatgaactgggtgaggcaggcacccggtaagggcctggagtgggtaagcactatcagcggcttcggcgagagcaccttctacgccgacagcgtgaagggcaggttcaccatcagcagggacaacagcaagaacaccctgtacctgcaaatgaacagcctcagggccgaggacaccgccgtgtactactgcgccaggctgggtgcggcacgcgctttcgatatctggggccagggaaccaccgtgaccgtgagcagcgccagcaccaagggccccagcgtgttccctctggcccccagcagcaagagcaccagcggcggaaccgccgccctgggctgcctggtgaaggactacttccccgagcccgtgaccgtgtcctggaacagcggcgctctgaccagcggagtgcacaccttccctgccgtgctgcagagcagcggcctgtactccctgagcagcgtggtgaccgtgcccagcagcagcctgggcacccagacctacatctgcaacgtgaaccacaagccctccaacaccaaggtggacaagaaggtggagcctaagagctgcgacaagacccacacctgccctccctgccccgcccccgagctgctgggcggacccagcgtgttcctgttccctcccaagcccaaggacaccctgatgatcagccgcacccccgaggtgacctgcgtggtggtggacgtgagccacgaggaccccgaggtgaagttcaactggtacgtggacggcgtggaggtgcacaacgccaagaccaagcctcgggaggagcagtacaactccacctaccgcgtggtgagcgtgctgaccgtgctgcaccaggactggctgaacggcaaggagtacaagtgcaaggtgagcaacaaggccctgcccgctcccatcgagaagaccatcagcaaggccaagggccagccccgggagcctcaggtgtacaccctgccccccagccgcgaagagatgaccaagaaccaggtgagcctgacctgcctggtgaagggcttctacccctccgacatcgccgtggagtgggagagcaacggccagcctgagaacaactacaagaccacccctcccgtgctggacagcgacggcagcttcttcctgtacagcaagctgaccgtggacaagtcccggtggcagcagggcaacgtgttcagctgcagcgtgatgcacgaggccctgcacaaccactacacccagaagagcctgagcctgagccccggatagtaa

SEQ ID NO: 219 - protein, 471 aa, Artificial Sequence
  IgG1 heavy chain
MDPKGSLSWRILLFLSLAFELSYGEVQLLESGGGLVQPGGSLRLSCAASGFTFSDYYMNWVRQAPGKGLEWVSTISGFGESTFYADSVKGRFTISRDNSKNTLYLQMNSLRAEDTAVYYCARLGAARAFDIWGQGTTVTVSSASTKGPSVFPLAPSSKSTSGGTAALGCLVKDYFPEPVTVSWNSGALTSGVHTFPAVLQSSGLYSLSSVVTVPSSSLGTQTYICNVNHKPSNTKVDKKVEPKSCDKTHTCPPCPAPELLGGPSVFLFPPKPKDTLMISRTPEVTCVVVDVSHEDPEVKFNWYVDGVEVHNAKTKPREEQYNSTYRVVSVLTVLHQDWLNGKEYKCKVSNKALPAPIEKTISKAKGQPREPQVYTLPPSREEMTKNQVSLTCLVKGFYPSDIAVEWESNGQPENNYKTTPPVLDSDGSFFLYSKLTVDKSRWQQGNVFSCSVMHEALHNHYTQKSLSLSPG

SEQ ID NO: 220 - DNA, 1422 bp, Artificial Sequence
  IgG1 heavy chain
atggaccccaagggcagcctgagctggagaatcctgctgttcctgagcctggccttcgagctgagctacggcgaggtgcagctcctggagagtggcggtggccttgtgcagcccggtggcagcctgcgactgagctgcgccgcaagcggcttcaccttcagcaattacgcaatggcctgggtgaggcaggccccaggcaagggcctggagtgggtcagctggatcagcggcagcggtagctatatctactacgccgacagcgtgaagggcaggttcaccatcagcagggacaacagtaagaacaccctgtacctgcagatgaacagcctgagggcagaagacaccgccgtgtactactgcgccaggaggggcagcagctggtcaaacttcgactactggggtcagggcaccctggtgaccgtgagcagcgccagcaccaagggccccagcgtgttccctctggcccccagcagcaagagcaccagcggcggaaccgccgccctgggctgcctggtgaaggactacttccccgagcccgtgaccgtgtcctggaacagcggcgctctgaccagcggagtgcacaccttccctgccgtgctgcagagcagcggcctgtactccctgagcagcgtggtgaccgtgcccagcagcagcctgggcacccagacctacatctgcaacgtgaaccacaagccctccaacaccaaggtggacaagaaggtggagcctaagagctgcgacaagacccacacctgccctccctgccccgcccccgagctgctgggcggacccagcgtgttcctgttccctcccaagcccaaggacaccctgatgatcagccgcacccccgaggtgacctgcgtggtggtggacgtgagccacgaggaccccgaggtgaagttcaactggtacgtggacggcgtggaggtgcacaacgccaagaccaagcctcgggaggagcagtacaactccacctaccgcgtggtgagcgtgctgaccgtgctgcaccaggactggctgaacggcaaggagtacaagtgcaaggtgagcaacaaggccctgcccgctcccatcgagaagaccatcagcaaggccaagggccagccccgggagcctcaggtgtacaccctgccccccagccgcgaagagatgaccaagaaccaggtgagcctgacctgcctggtgaagggcttctacccctccgacatcgccgtggagtgggagagcaacggccagcctgagaacaactacaagaccacccctcccgtgctggacagcgacggcagcttcttcctgtacagcaagctgaccgtggacaagtcccggtggcagcagggcaacgtgttcagctgcagcgtgatgcacgaggccctgcacaaccactacacccagaagagcctgagcctgagccccggatagtaa

SEQ ID NO: 221 - protein, 472 aa, Artificial Sequence
  IgG1 heavy chain
MDPKGSLSWRILLFLSLAFELSYGEVQLLESGGGLVQPGGSLRLSCAASGFTFSNYAMAWVRQAPGKGLEWVSWISGSGSYIYYADSVKGRFTISRDNSKNTLYLQMNSLRAEDTAVYYCARRGSSWSNFDYWGQGTLVTVSSASTKGPSVFPLAPSSKSTSGGTAALGCLVKDYFPEPVTVSWNSGALTSGVHTFPAVLQSSGLYSLSSVVTVPSSSLGTQTYICNVNHKPSNTKVDKKVEPKSCDKTHTCPPCPAPELLGGPSVFLFPPKPKDTLMISRTPEVTCVVVDVSHEDPEVKFNWYVDGVEVHNAKTKPREEQYNSTYRVVSVLTVLHQDWLNGKEYKCKVSNKALPAPIEKTISKAKGQPREPQVYTLPPSREEMTKNQVSLTCLVKGFYPSDIAVEWESNGQPENNYKTTPPVLDSDGSFFLYSKLTVDKSRWQQGNVFSCSVMHEALHNHYTQKSLSLSPG

SEQ ID NO: 222 - DNA, 1443 bp, Artificial Sequence
  IgG1 heavy chain
atggaccccaagggcagcctgagctggagaatcctgctgttcctgagcctggccttcgagctgagctacggccaggtgcagctggtgcagagcggcgctgaggtgaagaagcccggagccagcgtgaaggtgagctgcaaggccagcggctacacctttagcacctacgatatcaactgggtgaggcaggctcctggtcagggcctggagtgggtgggcatcatcagccccagcggaggctggaccacctatgcccagaagttccagggaagggtgaccatgacccgcgacaccagcacgagtaccgtgtatatggagctgagcagcctgaggagcgaggacaccgccgtgtactactgcgccagggtcaactacgacatcctgaccgggcagggcagaggctactacttcgactactggggccagggcacactggtgaccgtgagctctgccagcaccaagggccccagcgtgttccctctggcccccagcagcaagagcaccagcggcggaaccgccgccctgggctgcctggtgaaggactacttccccgagcccgtgaccgtgtcctggaacagcggcgctctgaccagcggagtgcacaccttccctgccgtgctgcagagcagcggcctgtactccctgagcagcgtggtgaccgtgcccagcagcagcctgggcacccagacctacatctgcaacgtgaaccacaagccctccaacaccaaggtggacaagaaggtggagcctaagagctgcgacaagacccacacctgccctccctgccccgcccccgagctgctgggcggacccagcgtgttcctgttccctcccaagcccaaggacaccctgatgatcagccgcacccccgaggtgacctgcgtggtggtggacgtgagccacgaggaccccgaggtgaagttcaactggtacgtggacggcgtggaggtgcacaacgccaagaccaagcctcgggaggagcagtacaactccacctaccgcgtggtgagcgtgctgaccgtgctgcaccaggactggctgaacggcaaggagtacaagtgcaaggtgagcaacaaggccctgcccgctcccatcgagaagaccatcagcaaggccaagggccagccccgggagcctcaggtgtacaccctgccccccagccgcgaagagatgaccaagaaccaggtgagcctgacctgcctggtgaagggcttctacccctccgacatcgccgtggagtgggagagcaacggccagcctgagaacaactacaagaccacccctcccgtgctggacagcgacggcagcttcttcctgtacagcaagctgaccgtggacaagtcccggtggcagcagggcaacgtgttcagctgcagcgtgatgcacgaggccctgcacaaccactacacccagaagagcctgagcctgagccccggatagtaa

SEQ ID NO: 223 - protein, 479 aa, Artificial Sequence
  IgG1 heavy chain
MDPKGSLSWRILLFLSLAFELSYGQVQLVQSGAEVKKPGASVKVSCKASGYTFSTYDINWVRQAPGQGLEWVGIISPSGGWTTYAQKFQGRVTMTRDTSTSTVYMELSSLRSEDTAVYYCARVNYDILTGQGRGYYFDYWGQGTLVTVSSASTKGPSVFPLAPSSKSTSGGTAALGCLVKDYFPEPVTVSWNSGALTSGVHTFPAVLQSSGLYSLSSVVTVPSSSLGTQTYICNVNHKPSNTKVDKKVEPKSCDKTHTCPPCPAPELLGGPSVFLFPPKPKDTLMISRTPEVTCVVVDVSHEDPEVKFNWYVDGVEVHNAKTKPREEQYNSTYRVVSVLTVLHQDWLNGKEYKCKVSNKALPAPIEKTISKAKGQPREPQVYTLPPSREEMTKNQVSLTCLVKGFYPSDIAVEWESNGQPENNYKTTPPVLDSDGSFFLYSKLTVDKSRWQQGNVFSCSVMHEALHNHYTQKSLSLSPG

SEQ ID NO: 224 - DNA, 1425 bp, Artificial Sequence
  IgG1 heavy chain
atggaccccaagggcagcctgagctggagaatcctgctgttcctgagcctggccttcgagctgagctacggccaggtgcagctggtgcagtccggagcggaggtgaagaagcccggcagcagcgtgaaggtgagctgcaaggccagcggctacatcttcacaaggtactacgtgaactgggtgaggcaggcgccaggacagggcctggagtggatgggcggcatcatccccatgttcggaaccagcaactacgcccagaagttccagggcagggtgaccatcaccgcagacgagagcacctccaccgcctacatggagctgagcagcctgaggagcgaggacaccgccgtgtactactgcgcgaggagcagcggatatgacagcttcaagatcgactactggggccaggggaccctggtgaccgtgagctctgcaagcaccaagggccccagcgtgttccctctggcccccagcagcaagagcaccagcggcggaaccgccgccctgggctgcctggtgaaggactacttccccgagcccgtgaccgtgtcctggaacagcggcgctctgaccagcggagtgcacaccttccctgccgtgctgcagagcagcggcctgtactccctgagcagcgtggtgaccgtgcccagcagcagcctgggcacccagacctacatctgcaacgtgaaccacaagccctccaacaccaaggtggacaagaaggtggagcctaagagctgcgacaagacccacacctgccctccctgccccgcccccgagctgctgggcggacccagcgtgttcctgttccctcccaagcccaaggacaccctgatgatcagccgcacccccgaggtgacctgcgtggtggtggacgtgagccacgaggaccccgaggtgaagttcaactggtacgtggacggcgtggaggtgcacaacgccaagaccaagcctcgggaggagcagtacaactccacctaccgcgtggtgagcgtgctgaccgtgctgcaccaggactggctgaacggcaaggagtacaagtgcaaggtgagcaacaaggccctgcccgctcccatcgagaagaccatcagcaaggccaagggccagccccgggagcctcaggtgtacaccctgccccccagccgcgaagagatgaccaagaaccaggtgagcctgacctgcctggtgaagggcttctacccctccgacatcgccgtggagtgggagagcaacggccagcctgagaacaactacaagaccacccctcccgtgctggacagcgacggcagcttcttcctgtacagcaagctgaccgtggacaagtcccggtggcagcagggcaacgtgttcagctgcagcgtgatgcacgaggccctgcacaaccactacacccagaagagcctgagcctgagccccggatagtaa

SEQ ID NO: 225 - protein, 473 aa, Artificial Sequence
  IgG1 heavy chain
MDPKGSLSWRILLFLSLAFELSYGQVQLVQSGAEVKKPGSSVKVSCKASGYIFTRYYVNWVRQAPGQGLEWMGGIIPMFGTSNYAQKFQGRVTITADESTSTAYMELSSLRSEDTAVYYCARSSGYDSFKIDYWGQGTLVTVSSASTKGPSVFPLAPSSKSTSGGTAALGCLVKDYFPEPVTVSWNSGALTSGVHTFPAVLQSSGLYSLSSVVTVPSSSLGTQTYICNVNHKPSNTKVDKKVEPKSCDKTHTCPPCPAPELLGGPSVFLFPPKPKDTLMISRTPEVTCVVVDVSHEDPEVKFNWYVDGVEVHNAKTKPREEQYNSTYRVVSVLTVLHQDWLNGKEYKCKVSNKALPAPIEKTISKAKGQPREPQVYTLPPSREEMTKNQVSLTCLVKGFYPSDIAVEWESNGQPENNYKTTPPVLDSDGSFFLYSKLTVDKSRWQQGNVFSCSVMHEALHNHYTQKSLSLSPG

SEQ ID NO: 226 - DNA, 1428 bp, Artificial Sequence
  IgG1 heavy chain
atggaccccaagggcagcctgagctggagaatcctgctgttcctgagcctggccttcgagctgagctacggccaggtgcagctggttcagagcggggcagaggtgaagaagcccggtgccagcgtgaaagtgagctgcaaggccagcggctacaccttcaccagctactacatgcactgggtgaggcaggcacccggacagggcctggagtggatgggctggatgaaccccaacagcggcaacaccggctacgcccagaagtttcagggcagggtgaccatgaccagggacaccagcacctccaccgtttacatggagctgagcagcctgaggagcgaggacaccgccgtgtactactgcgccagggagaccagcttcgattactactacggcatggacgtgtggggccagggcaccaccgtgaccgtgagctctgccagcaccaagggccccagcgtgttccctctggcccccagcagcaagagcaccagcggcggaaccgccgccctgggctgcctggtgaaggactacttccccgagcccgtgaccgtgtcctggaacagcggcgctctgaccagcggagtgcacaccttccctgccgtgctgcagagcagcggcctgtactccctgagcagcgtggtgaccgtgcccagcagcagcctgggcacccagacctacatctgcaacgtgaaccacaagccctccaacaccaaggtggacaagaaggtggagcctaagagctgcgacaagacccacacctgccctccctgccccgcccccgagctgctgggcggacccagcgtgttcctgttccctcccaagcccaaggacaccctgatgatcagccgcacccccgaggtgacctgcgtggtggtggacgtgagccacgaggaccccgaggtgaagttcaactggtacgtggacggcgtggaggtgcacaacgccaagaccaagcctcgggaggagcagtacaactccacctaccgcgtggtgagcgtgctgaccgtgctgcaccaggactggctgaacggcaaggagtacaagtgcaaggtgagcaacaaggccctgcccgctcccatcgagaagaccatcagcaaggccaagggccagccccgggagcctcaggtgtacaccctgccccccagccgcgaagagatgaccaagaaccaggtgagcctgacctgcctggtgaagggcttctacccctccgacatcgccgtggagtgggagagcaacggccagcctgagaacaactacaagaccacccctcccgtgctggacagcgacggcagcttcttcctgtacagcaagctgaccgtggacaagtcccggtggcagcagggcaacgtgttcagctgcagcgtgatgcacgaggccctgcacaaccactacacccagaagagcctgagcctgagccccggatagtaa

SEQ ID NO: 227 - protein, 474 aa, Artificial Sequence
  IgG1 heavy chain
MDPKGSLSWRILLFLSLAFELSYGQVQLVQSGAEVKKPGASVKVSCKASGYTFTSYYMHWVRQAPGQGLEWMGWMNPNSGNTGYAQKFQGRVTMTRDTSTSTVYMELSSLRSEDTAVYYCARETSFDYYYGMDVWGQGTTVTVSSASTKGPSVFPLAPSSKSTSGGTAALGCLVKDYFPEPVTVSWNSGALTSGVHTFPAVLQSSGLYSLSSVVTVPSSSLGTQTYICNVNHKPSNTKVDKKVEPKSCDKTHTCPPCPAPELLGGPSVFLFPPKPKDTLMISRTPEVTCVVVDVSHEDPEVKFNWYVDGVEVHNAKTKPREEQYNSTYRVVSVLTVLHQDWLNGKEYKCKVSNKALPAPIEKTISKAKGQPREPQVYTLPPSREEMTKNQVSLTCLVKGFYPSDIAVEWESNGQPENNYKTTPPVLDSDGSFFLYSKLTVDKSRWQQGNVFSCSVMHEALHNHYTQKSLSLSPG

SEQ ID NO: 228 - DNA, 1440 bp, Artificial Sequence
  IgG1 heavy chain
atggaccccaagggcagcctgagctggagaatcctgctgttcctgagcctggccttcgagctgagctacggccaggtgcagctggtccagagcggggcagaggtgaagaagcccggcagcagtgtgaaggtgagctgcaaggccagcggctacacgttcaccaactatgccatcatctgggtaaggcaggcacccggccagggcctggagtggatgggcggcatcatccccgtgttcggcaccgccgactacactcagaccttccagggtagagtgaccatcaccgcagacgagagcaccagcaccgcttacatggagctgagtagccttcgcagcgaggacacagccgtgtactactgcgcccgagtatccacgaactactacgacagctcaggctattacgccttcgactactgggggcaggggaccctggtgaccgtgagcagcgccagcaccaagggccccagcgtgttccctctggcccccagcagcaagagcaccagcggcggaaccgccgccctgggctgcctggtgaaggactacttccccgagcccgtgaccgtgtcctggaacagcggcgctctgaccagcggagtgcacaccttccctgccgtgctgcagagcagcggcctgtactccctgagcagcgtggtgaccgtgcccagcagcagcctgggcacccagacctacatctgcaacgtgaaccacaagccctccaacaccaaggtggacaagaaggtggagcctaagagctgcgacaagacccacacctgccctccctgccccgcccccgagctgctgggcggacccagcgtgttcctgttccctcccaagcccaaggacaccctgatgatcagccgcacccccgaggtgacctgcgtggtggtggacgtgagccacgaggaccccgaggtgaagttcaactggtacgtggacggcgtggaggtgcacaacgccaagaccaagcctcgggaggagcagtacaactccacctaccgcgtggtgagcgtgctgaccgtgctgcaccaggactggctgaacggcaaggagtacaagtgcaaggtgagcaacaaggccctgcccgctcccatcgagaagaccatcagcaaggccaagggccagccccgggagcctcaggtgtacaccctgccccccagccgcgaagagatgaccaagaaccaggtgagcctgacctgcctggtgaagggcttctacccctccgacatcgccgtggagtgggagagcaacggccagcctgagaacaactacaagaccacccctcccgtgctggacagcgacggcagcttcttcctgtacagcaagctgaccgtggacaagtcccggtggcagcagggcaacgtgttcagctgcagcgtgatgcacgaggccctgcacaaccactacacccagaagagcctgagcctgagccccggatagtaa

SEQ ID NO: 229 - protein, 478 aa, Artificial Sequence
  IgG1 heavy chain
MDPKGSLSWRILLFLSLAFELSYGQVQLVQSGAEVKKPGSSVKVSCKASGYTFTNYAIIWVRQAPGQGLEWMGGIIPVFGTADYTQTFQGRVTITADESTSTAYMELSSLRSEDTAVYYCARVSTNYYDSSGYYAFDYWGQGTLVTVSSASTKGPSVFPLAPSSKSTSGGTAALGCLVKDYFPEPVTVSWNSGALTSGVHTFPAVLQSSGLYSLSSVVTVPSSSLGTQTYICNVNHKPSNTKVDKKVEPKSCDKTHTCPPCPAPELLGGPSVFLFPPKPKDTLMISRTPEVTCVVVDVSHEDPEVKFNWYVDGVEVHNAKTKPREEQYNSTYRVVSVLTVLHQDWLNGKEYKCKVSNKALPAPIEKTISKAKGQPREPQVYTLPPSREEMTKNQVSLTCLVKGFYPSDIAVEWESNGQPENNYKTTPPVLDSDGSFFLYSKLTVDKSRWQQGNVFSCSVMHEALHNHYTQKSLSLSPG

SEQ ID NO: 230 - DNA, 1434 bp, Artificial Sequence
  IgG1 heavy chain
atggaccccaagggcagcctgagctggagaatcctgctgttcctgagcctggccttcgagctgagctacggcgaggtgcaactgctggagtctggtggcggcctggtgcagcccggaggaagccttaggttgagctgcgccgcaagcggcttcaccttcagcagctacgccatgcactgggtgaggcaggccccagggaagggcctggagtgggttgccgttatgagctacgacggcaggcacgagtactatgccgacagcgtgaagggcaggttcaccatcagcagggacaacagcaagaacaccctgtacctgcagatgaacagcctgagggccgaggataccgcagtgtactactgcgccagcaccgactacgacatcggcggatacagcctccccctggactactggggacagggcaccctggtgaccgtgagcagcgccagcaccaagggccccagcgtgttccctctggcccccagcagcaagagcaccagcggcggaaccgccgccctgggctgcctggtgaaggactacttccccgagcccgtgaccgtgtcctggaacagcggcgctctgaccagcggagtgcacaccttccctgccgtgctgcagagcagcggcctgtactccctgagcagcgtggtgaccgtgcccagcagcagcctgggcacccagacctacatctgcaacgtgaaccacaagccctccaacaccaaggtggacaagaaggtggagcctaagagctgcgacaagacccacacctgccctccctgccccgcccccgagctgctgggcggacccagcgtgttcctgttccctcccaagcccaaggacaccctgatgatcagccgcacccccgaggtgacctgcgtggtggtggacgtgagccacgaggaccccgaggtgaagttcaactggtacgtggacggcgtggaggtgcacaacgccaagaccaagcctcgggaggagcagtacaactccacctaccgcgtggtgagcgtgctgaccgtgctgcaccaggactggctgaacggcaaggagtacaagtgcaaggtgagcaacaaggccctgcccgctcccatcgagaagaccatcagcaaggccaagggccagccccgggagcctcaggtgtacaccctgccccccagccgcgaagagatgaccaagaaccaggtgagcctgacctgcctggtgaagggcttctacccctccgacatcgccgtggagtgggagagcaacggccagcctgagaacaactacaagaccacccctcccgtgctggacagcgacggcagcttcttcctgtacagcaagctgaccgtggacaagtcccggtggcagcagggcaacgtgttcagctgcagcgtgatgcacgaggccctgcacaaccactacacccagaagagcctgagcctgagccccggatagtaa

SEQ ID NO: 231 - protein, 476 aa, Artificial Sequence
  IgG1 heavy chain
MDPKGSLSWRILLFLSLAFELSYGEVQLLESGGGLVQPGGSLRLSCAASGFTFSSYAMHWVRQAPGKGLEWVAVMSYDGRHEYYADSVKGRFTISRDNSKNTLYLQMNSLRAEDTAVYYCASTDYDIGGYSLPLDYWGQGTLVTVSSASTKGPSVFPLAPSSKSTSGGTAALGCLVKDYFPEPVTVSWNSGALTSGVHTFPAVLQSSGLYSLSSVVTVPSSSLGTQTYICNVNHKPSNTKVDKKVEPKSCDKTHTCPPCPAPELLGGPSVFLFPPKPKDTLMISRTPEVTCVVVDVSHEDPEVKFNWYVDGVEVHNAKTKPREEQYNSTYRVVSVLTVLHQDWLNGKEYKCKVSNKALPAPIEKTISKAKGQPREPQVYTLPPSREEMTKNQVSLTCLVKGFYPSDIAVEWESNGQPENNYKTTPPVLDSDGSFFLYSKLTVDKSRWQQGNVFSCSVMHEALHNHYTQKSLSLSPG

SEQ ID NO: 232 - DNA, 1413 bp, Artificial Sequence
  IgG1 heavy chain
atggaccccaagggcagcctgagctggagaatcctgctgttcctgagcctggccttcgagctgagctacggccaggtgcagctggtgcagtccggcgcagaagtgaagaagcccggcagcagcgtgaaggtgagctgcaaggccagcggctacactttcacggactactacatccactgggtgaggcaggcacccggtcaaggtctggaatggatgggcggcatcatccccatctacggcaccgcaaactacgcccagaagttccaaggcagggtgaccatcaccgctgacgagagcaccagtaccgcctacatggagctgagcagcctgaggagcgaggacaccgccgtctactactgcgccaggactaactggggtatggacgtgtggggccaggggaccaccgtgactgtgagctctgccagcaccaagggccccagcgtgttccctctggcccccagcagcaagagcaccagcggcggaaccgccgccctgggctgcctggtgaaggactacttccccgagcccgtgaccgtgtcctggaacagcggcgctctgaccagcggagtgcacaccttccctgccgtgctgcagagcagcggcctgtactccctgagcagcgtggtgaccgtgcccagcagcagcctgggcacccagacctacatctgcaacgtgaaccacaagccctccaacaccaaggtggacaagaaggtggagcctaagagctgcgacaagacccacacctgccctccctgccccgcccccgagctgctgggcggacccagcgtgttcctgttccctcccaagcccaaggacaccctgatgatcagccgcacccccgaggtgacctgcgtggtggtggacgtgagccacgaggaccccgaggtgaagttcaactggtacgtggacggcgtggaggtgcacaacgccaagaccaagcctcgggaggagcagtacaactccacctaccgcgtggtgagcgtgctgaccgtgctgcaccaggactggctgaacggcaaggagtacaagtgcaaggtgagcaacaaggccctgcccgctcccatcgagaagaccatcagcaaggccaagggccagccccgggagcctcaggtgtacaccctgccccccagccgcgaagagatgaccaagaaccaggtgagcctgacctgcctggtgaagggcttctacccctccgacatcgccgtggagtgggagagcaacggccagcctgagaacaactacaagaccacccctcccgtgctggacagcgacggcagcttcttcctgtacagcaagctgaccgtggacaagtcccggtggcagcagggcaacgtgttcagctgcagcgtgatgcacgaggccctgcacaaccactacacccagaagagcctgagcctgagccccggatagtaa

SEQ ID NO: 233 - protein, 469 aa, Artificial Sequence
  IgG1 heavy chain
MDPKGSLSWRILLFLSLAFELSYGQVQLVQSGAEVKKPGSSVKVSCKASGYTFTDYYIHWVRQAPGQGLEWMGGIIPIYGTANYAQKFQGRVTITADESTSTAYMELSSLRSEDTAVYYCARTNWGMDVWGQGTTVTVSSASTKGPSVFPLAPSSKSTSGGTAALGCLVKDYFPEPVTVSWNSGALTSGVHTFPAVLQSSGLYSLSSVVTVPSSSLGTQTYICNVNHKPSNTKVDKKVEPKSCDKTHTCPPCPAPELLGGPSVFLFPPKPKDTLMISRTPEVTCVVVDVSHEDPEVKFNWYVDGVEVHNAKTKPREEQYNSTYRVVSVLTVLHQDWLNGKEYKCKVSNKALPAPIEKTISKAKGQPREPQVYTLPPSREEMTKNQVSLTCLVKGFYPSDIAVEWESNGQPENNYKTTPPVLDSDGSFFLYSKLTVDKSRWQQGNVFSCSVMHEALHNHYTQKSLSLSPG

SEQ ID NO: 234 - DNA, 1416 bp, Artificial Sequence
  IgG1 heavy chain
atggaccccaagggcagcctgagctggagaatcctgctgttcctgagcctggccttcgagctgagctacggccaggtgcagctcgtgcagagcggtgcccaggtgaagaagcccggtgccagcgtgaaggtgagttgcaaggcctcaggcggcactttcagcagctacaccatcagctgggtgaggcaggccccaggtcagggccttgagtggatgggcgtgatctaccccagcggcgacatcaccgtttacgcccaggagttccagggcagggtgaccatgaccagggacacctctaccagcaccgtgtatatggagctgagcagtctgaggagcgaggacaccgccgtgtactactgcgccagggcgtgggccagatacttcgactactggggtcaaggcaccctggtgactgtgagctctgccagcaccaagggccccagcgtgttccctctggcccccagcagcaagagcaccagcggcggaaccgccgccctgggctgcctggtgaaggactacttccccgagcccgtgaccgtgtcctggaacagcggcgctctgaccagcggagtgcacaccttccctgccgtgctgcagagcagcggcctgtactccctgagcagcgtggtgaccgtgcccagcagcagcctgggcacccagacctacatctgcaacgtgaaccacaagccctccaacaccaaggtggacaagaaggtggagcctaagagctgcgacaagacccacacctgccctccctgccccgcccccgagctgctgggcggacccagcgtgttcctgttccctcccaagcccaaggacaccctgatgatcagccgcacccccgaggtgacctgcgtggtggtggacgtgagccacgaggaccccgaggtgaagttcaactggtacgtggacggcgtggaggtgcacaacgccaagaccaagcctcgggaggagcagtacaactccacctaccgcgtggtgagcgtgctgaccgtgctgcaccaggactggctgaacggcaaggagtacaagtgcaaggtgagcaacaaggccctgcccgctcccatcgagaagaccatcagcaaggccaagggccagccccgggagcctcaggtgtacaccctgccccccagccgcgaagagatgaccaagaaccaggtgagcctgacctgcctggtgaagggcttctacccctccgacatcgccgtggagtgggagagcaacggccagcctgagaacaactacaagaccacccctcccgtgctggacagcgacggcagcttcttcctgtacagcaagctgaccgtggacaagtcccggtggcagcagggcaacgtgttcagctgcagcgtgatgcacgaggccctgcacaaccactacacccagaagagcctgagcctgagccccggatagtaa

SEQ ID NO: 235 - protein, 470 aa, Artificial Sequence
  IgG1 heavy chain
MDPKGSLSWRILLFLSLAFELSYGQVQLVQSGAQVKKPGASVKVSCKASGGTFSSYTISWVRQAPGQGLEWMGVIYPSGDITVYAQEFQGRVTMTRDTSTSTVYMELSSLRSEDTAVYYCARAWARYFDYWGQGTLVTVSSASTKGPSVFPLAPSSKSTSGGTAALGCLVKDYFPEPVTVSWNSGALTSGVHTFPAVLQSSGLYSLSSVVTVPSSSLGTQTYICNVNHKPSNTKVDKKVEPKSCDKTHTCPPCPAPELLGGPSVFLFPPKPKDTLMISRTPEVTCVVVDVSHEDPEVKFNWYVDGVEVHNAKTKPREEQYNSTYRVVSVLTVLHQDWLNGKEYKCKVSNKALPAPIEKTISKAKGQPREPQVYTLPPSREEMTKNQVSLTCLVKGFYPSDIAVEWESNGQPENNYKTTPPVLDSDGSFFLYSKLTVDKSRWQQGNVFSCSVMHEALHNHYTQKSLSLSPG

SEQ ID NO: 236 - DNA, 1413 bp, Artificial Sequence
  IgG1 heavy chain
atggaccccaagggcagcctgagctggagaatcctgctgttcctgagcctggccttcgagctgagctacggccaggtgcagctggtgcagagcggagccgaggtgaagaaacctggcgcaagcgttaaggtgagctgcaaggcctctggcaacaccttcaccgcctactacatgcactgggtgaggcaggcaccaggccagggcctggaatggatgggcatcatcaaccccagtgggggctcaaccagctacgcccagaagttccagggaagggttaccatgaccagggatacctccaccagcaccgtgtatatggagctgagcagcctgaggagcgaggacaccgccgtgtactactgcgcaaggggcgtgggagccaccaactactggggacagggcaccctggtgaccgtgagctctgccagcaccaagggccccagcgtgttccctctggcccccagcagcaagagcaccagcggcggaaccgccgccctgggctgcctggtgaaggactacttccccgagcccgtgaccgtgtcctggaacagcggcgctctgaccagcggagtgcacaccttccctgccgtgctgcagagcagcggcctgtactccctgagcagcgtggtgaccgtgcccagcagcagcctgggcacccagacctacatctgcaacgtgaaccacaagccctccaacaccaaggtggacaagaaggtggagcctaagagctgcgacaagacccacacctgccctccctgccccgcccccgagctgctgggcggacccagcgtgttcctgttccctcccaagcccaaggacaccctgatgatcagccgcacccccgaggtgacctgcgtggtggtggacgtgagccacgaggaccccgaggtgaagttcaactggtacgtggacggcgtggaggtgcacaacgccaagaccaagcctcgggaggagcagtacaactccacctaccgcgtggtgagcgtgctgaccgtgctgcaccaggactggctgaacggcaaggagtacaagtgcaaggtgagcaacaaggccctgcccgctcccatcgagaagaccatcagcaaggccaagggccagccccgggagcctcaggtgtacaccctgccccccagccgcgaagagatgaccaagaaccaggtgagcctgacctgcctggtgaagggcttctacccctccgacatcgccgtggagtgggagagcaacggccagcctgagaacaactacaagaccacccctcccgtgctggacagcgacggcagcttcttcctgtacagcaagctgaccgtggacaagtcccggtggcagcagggcaacgtgttcagctgcagcgtgatgcacgaggccctgcacaaccactacacccagaagagcctgagcctgagccccggatagtaa

SEQ ID NO: 237 - protein, 469 aa, Artificial Sequence
  IgG1 heavy chain
MDPKGSLSWRILLFLSLAFELSYGQVQLVQSGAEVKKPGASVKVSCKASGNTFTAYYMHWVRQAPGQGLEWMGIINPSGGSTSYAQKFQGRVTMTRDTSTSTVYMELSSLRSEDTAVYYCARGVGATNYWGQGTLVTVSSASTKGPSVFPLAPSSKSTSGGTAALGCLVKDYFPEPVTVSWNSGALTSGVHTFPAVLQSSGLYSLSSVVTVPSSSLGTQTYICNVNHKPSNTKVDKKVEPKSCDKTHTCPPCPAPELLGGPSVFLFPPKPKDTLMISRTPEVTCVVVDVSHEDPEVKFNWYVDGVEVHNAKTKPREEQYNSTYRVVSVLTVLHQDWLNGKEYKCKVSNKALPAPIEKTISKAKGQPREPQVYTLPPSREEMTKNQVSLTCLVKGFYPSDIAVEWESNGQPENNYKTTPPVLDSDGSFFLYSKLTVDKSRWQQGNVFSCSVMHEALHNHYTQKSLSLSPG

SEQ ID NO: 238 - DNA, 1443 bp, Artificial Sequence
  IgG1 heavy chain
atggaccccaagggcagcctgagctggagaatcctgctgttcctgagcctggccttcgagctgagctacggccaggtgcagctggtgcagtcaggtgccgaggtgaagaagcccggcagcagcgtgaaggtgagctgcaaggccagcggctacaggttcaccgactactatatccactgggtgaggcaggctcccggacagggcctggagtggatgggcatcatccagcccaccggcggagggaccacctacgctcagaagttccagggcagggtgaccatcactgccgacgagagcaccagtaccgcctacatggagctgagcagcctgaggagcgaggacaccgccgtgtactactgcgccagggtgggcgccactgtgacaaagaattactattactactacggcatggacgtgtggggccaaggcaccaccgttaccgtgagctctgccagcaccaagggccccagcgtgttccctctggcccccagcagcaagagcaccagcggcggaaccgccgccctgggctgcctggtgaaggactacttccccgagcccgtgaccgtgtcctggaacagcggcgctctgaccagcggagtgcacaccttccctgccgtgctgcagagcagcggcctgtactccctgagcagcgtggtgaccgtgcccagcagcagcctgggcacccagacctacatctgcaacgtgaaccacaagccctccaacaccaaggtggacaagaaggtggagcctaagagctgcgacaagacccacacctgccctccctgccccgcccccgagctgctgggcggacccagcgtgttcctgttccctcccaagcccaaggacaccctgatgatcagccgcacccccgaggtgacctgcgtggtggtggacgtgagccacgaggaccccgaggtgaagttcaactggtacgtggacggcgtggaggtgcacaacgccaagaccaagcctcgggaggagcagtacaactccacctaccgcgtggtgagcgtgctgaccgtgctgcaccaggactggctgaacggcaaggagtacaagtgcaaggtgagcaacaaggccctgcccgctcccatcgagaagaccatcagcaaggccaagggccagccccgggagcctcaggtgtacaccctgccccccagccgcgaagagatgaccaagaaccaggtgagcctgacctgcctggtgaagggcttctacccctccgacatcgccgtggagtgggagagcaacggccagcctgagaacaactacaagaccacccctcccgtgctggacagcgacggcagcttcttcctgtacagcaagctgaccgtggacaagtcccggtggcagcagggcaacgtgttcagctgcagcgtgatgcacgaggccctgcacaaccactacacccagaagagcctgagcctgagccccggatagtaa

SEQ ID NO: 239 - protein, 479 aa, Artificial Sequence
  IgG1 heavy chain
MDPKGSLSWRILLFLSLAFELSYGQVQLVQSGAEVKKPGSSVKVSCKASGYRFTDYYIHWVRQAPGQGLEWMGIIQPTGGGTTYAQKFQGRVTITADESTSTAYMELSSLRSEDTAVYYCARVGATVTKNYYYYYGMDVWGQGTTVTVSSASTKGPSVFPLAPSSKSTSGGTAALGCLVKDYFPEPVTVSWNSGALTSGVHTFPAVLQSSGLYSLSSVVTVPSSSLGTQTYICNVNHKPSNTKVDKKVEPKSCDKTHTCPPCPAPELLGGPSVFLFPPKPKDTLMISRTPEVTCVVVDVSHEDPEVKFNWYVDGVEVHNAKTKPREEQYNSTYRVVSVLTVLHQDWLNGKEYKCKVSNKALPAPIEKTISKAKGQPREPQVYTLPPSREEMTKNQVSLTCLVKGFYPSDIAVEWESNGQPENNYKTTPPVLDSDGSFFLYSKLTVDKSRWQQGNVFSCSVMHEALHNHYTQKSLSLSPG

SEQ ID NO: 240 - DNA, 720 bp, Artificial Sequence
  IgG1 light chain
atggagaccgacaccctgctgctctgggtgctgctgctctgggtgcccggctccaccggagacatcgtgatgacccaaagccccctgagcctgcccgtgactcccggcgagcccgcctcaatcagctgcaggagcagccaaagtttgctgcacagcaacggctacaactacctggactggtacctgcagaagcctggacagagcccacaactgttgatctacgccgccagcagccttcaaagcggcgtgcccgacaggttcagcggcagtggaagtggcaccgacttcaccctgaagatcagcagggtggaggccgaggacgtgggcgtctactactgtatgcaggccctgcaaaccccacccaccttcggccagggaaccaaggtggaaatcaagaggaccgtggccgcccccagcgtgttcatcttccctcccagcgacgagcagctgaagtctggcaccgccagcgtggtgtgcctgctgaacaacttctacccccgcgaggccaaggtgcagtggaaggtggacaacgccctgcagagcggcaacagccaggagagcgtgaccgagcaggactccaaggacagcacctacagcctgagcagcaccctgaccctgagcaaggccgactacgagaagcacaaggtgtacgcctgcgaggtgacccaccagggactgtctagccccgtgaccaagagcttcaaccggggcgagtgctaa

SEQ ID NO: 241 - protein, 239 aa, Artificial Sequence
  IgG1 light chain
METDTLLLWVLLLWVPGSTGDIVMTQSPLSLPVTPGEPASISCRSSQSLLHSNGYNYLDWYLQKPGQSPQLLIYAASSLQSGVPDRFSGSGSGTDFTLKISRVEAEDVGVYYCMQALQTPPTFGQGTKVEIKRTVAAPSVFIFPPSDEQLKSGTASVVCLLNNFYPREAKVQWKVDNALQSGNSQESVTEQDSKDSTYSLSSTLTLSKADYEKHKVYACEVTHQGLSSPVTKSFNRGEC

SEQ ID NO: 242 - DNA, 720 bp, Artificial Sequence
  IgG1 light chain
atggagaccgacaccctgctgctctgggtgctgctgctctgggtgcccggctccaccggagacatcgtgatgacccagagccccgacagcctggccgtgagcctgggcgagagggccaccatcaactgcaagagcagccagagcgtgctttacagcagcaacaacaagaactacctggcgtggtatcagcagaagcccggtcagccccctaagctcctgatctactgggccagcaccagggagagcggcgtgcctgacagattcagcggcagcgggagcggcaccgatttcaccctgaccattagcagccttcaggccgaggacgtggctgtgtactactgccagcagtactacaccagcccgaccttcggccaaggcaccaagttggagatcaagaggaccgtggccgcccccagcgtgttcatcttccctcccagcgacgagcagctgaagtctggcaccgccagcgtggtgtgcctgctgaacaacttctacccccgcgaggccaaggtgcagtggaaggtggacaacgccctgcagagcggcaacagccaggagagcgtgaccgagcaggactccaaggacagcacctacagcctgagcagcaccctgaccctgagcaaggccgactacgagaagcacaaggtgtacgcctgcgaggtgacccaccagggactgtctagccccgtgaccaagagcttcaaccggggcgagtgctaa

SEQ ID NO: 243 - protein, 239 aa, Artificial Sequence
  IgG1 light chain
METDTLLLWVLLLWVPGSTGDIVMTQSPDSLAVSLGERATINCKSSQSVLYSSNNKNYLAWYQQKPGQPPKLLIYWASTRESGVPDRFSGSGSGTDFTLTISSLQAEDVAVYYCQQYYTSPTFGQGTKLEIKRTVAAPSVFIFPPSDEQLKSGTASVVCLLNNFYPREAKVQWKVDNALQSGNSQESVTEQDSKDSTYSLSSTLTLSKADYEKHKVYACEVTHQGLSSPVTKSFNRGEC

SEQ ID NO: 244 - DNA, 720 bp, Artificial Sequence
  IgG1 light chain
atggagaccgacaccctgctgctctgggtgctgctgctctgggtgcccggctccaccggagacatcgtgatgacccagagccctctgagcctgcccgtgacccccggtgagcccgccagcatcagctgcaggagctcacagtcactgctgcacagcaacggctacaactacctggactggtacctgcagaagccgggtcagtctccccagctgttgatctacttgggcagcaacagggccagcggcgtgcccgacaggttcagcggcagcggtagcggcaccgacttcaccctgaagattagcagggtggaggccgaggacgtgggcgtttactactgtatgcagagcatccagatcccacccaccttcggccctggaaccaaggtggacatcaagaggaccgtggccgcccccagcgtgttcatcttccctcccagcgacgagcagctgaagtctggcaccgccagcgtggtgtgcctgctgaacaacttctacccccgcgaggccaaggtgcagtggaaggtggacaacgccctgcagagcggcaacagccaggagagcgtgaccgagcaggactccaaggacagcacctacagcctgagcagcaccctgaccctgagcaaggccgactacgagaagcacaaggtgtacgcctgcgaggtgacccaccagggactgtctagccccgtgaccaagagcttcaaccggggcgagtgctaa

SEQ ID NO: 245 - protein, 239 aa, Artificial Sequence
  IgG1 light chain
METDTLLLWVLLLWVPGSTGDIVMTQSPLSLPVTPGEPASISCRSSQSLLHSNGYNYLDWYLQKPGQSPQLLIYLGSNRASGVPDRFSGSGSGTDFTLKISRVEAEDVGVYYCMQSIQIPPTFGPGTKVDIKRTVAAPSVFIFPPSDEQLKSGTASVVCLLNNFYPREAKVQWKVDNALQSGNSQESVTEQDSKDSTYSLSSTLTLSKADYEKHKVYACEVTHQGLSSPVTKSFNRGEC

SEQ ID NO: 246 - DNA, 708 bp, Artificial Sequence
  IgG1 light chain
atggagaccgacaccctgctgctctgggtgctgctgctctgggtgcccggctccaccggagagatcgtgatgacccagagtcccgccacactgagcgtgagccccggagagcgagccaccctgagctgcagggccagccagagtgtgagcagcagctacctggcctggtatcaacagaagcccggtcaagcccccaggctgctgatctacggcgccagcacacgcgccaccggcatccccgctaggttcagcggcagtggcagcggcaccgagttcacccttaccattagcagcttgcagagtgaggacttcgccgtgtactactgccagcagagctacagcattcccttcaccttcggccagggaaccaagctggagatcaagaggaccgtggccgcccccagcgtgttcatcttccctcccagcgacgagcagctgaagtctggcaccgccagcgtggtgtgcctgctgaacaacttctacccccgcgaggccaaggtgcagtggaaggtggacaacgccctgcagagcggcaacagccaggagagcgtgaccgagcaggactccaaggacagcacctacagcctgagcagcaccctgaccctgagcaaggccgactacgagaagcacaaggtgtacgcctgcgaggtgacccaccagggactgtctagccccgtgaccaagagcttcaaccggggcgagtgctaa

SEQ ID NO: 247 - protein, 235 aa, Artificial Sequence
  IgG1 light chain
METDTLLLWVLLLWVPGSTGEIVMTQSPATLSVSPGERATLSCRASQSVSSSYLAWYQQKPGQAPRLLIYGASTRATGIPARFSGSGSGTEFTLTISSLQSEDFAVYYCQQSYSIPFTFGQGTKLEIKRTVAAPSVFIFPPSDEQLKSGTASVVCLLNNFYPREAKVQWKVDNALQSGNSQESVTEQDSKDSTYSLSSTLTLSKADYEKHKVYACEVTHQGLSSPVTKSFNRGEC

SEQ ID NO: 248 - DNA, 705 bp, Artificial Sequence
  IgG1 light chain
atggagaccgacaccctgctgctctgggtgctgctgctctgggtgcccggctccaccggagacatccagatgacccagagccccagctccctgagcgccagcgtgggcgacagggtgaccatcacctgtagggccagccagggcatcggcaacgacctggcctggtatcaacagaagcccggcaaggcccccaagctgctgatctacgccgccagtagcttgcagagcggcgtgcccagcaggttcagtggcagcggcagtggtaccgacttcaccctcaccattagcagcctgcagcccgaggacttcgccacctactactgtcagcagagctacagcaccccctacaccttcggacagggcactaaggtggagatcaagaggaccgtggccgcccccagcgtgttcatcttccctcccagcgacgagcagctgaagtctggcaccgccagcgtggtgtgcctgctgaacaacttctacccccgcgaggccaaggtgcagtggaaggtggacaacgccctgcagagcggcaacagccaggagagcgtgaccgagcaggactccaaggacagcacctacagcctgagcagcaccctgaccctgagcaaggccgactacgagaagcacaaggtgtacgcctgcgaggtgacccaccagggactgtctagccccgtgaccaagagcttcaaccggggcgagtgctaa

SEQ ID NO: 249 - protein, 234 aa, Artificial Sequence
  IgG1 light chain
METDTLLLWVLLLWVPGSTGDIQMTQSPSSLSASVGDRVTITCRASQGIGNDLAWYQQKPGKAPKLLIYAASSLQSGVPSRFSGSGSGTDFTLTISSLQPEDFATYYCQQSYSTPYTFGQGTKVEIKRTVAAPSVFIFPPSDEQLKSGTASVVCLLNNFYPREAKVQWKVDNALQSGNSQESVTEQDSKDSTYSLSSTLTLSKADYEKHKVYACEVTHQGLSSPVTKSFNRGEC

SEQ ID NO: 250 - DNA, 705 bp, Artificial Sequence
  IgG1 light chain
atggagaccgacaccctgctgctctgggtgctgctgctctgggtgcccggctccaccggagacatccagatgacccagagccccagcagtctgtccgccagcgtgggcgacagggttaccatcacctgccgagccagccagagcatcagcaactggcttgcctggtatcaacagaagcccggcaaggcccccaagctgctgatctacagcgccagcagcctgcagaacggcgtgcctagcaggttcagcgggagcggcagcggcaccgacttcaccctgaccattagctccctgcagcccgaggacttcgccacctactactgccagcaaagctacagcaccccacccactttcggccagggcaccaaggtggagatcaagaggaccgtggccgcccccagcgtgttcatcttccctcccagcgacgagcagctgaagtctggcaccgccagcgtggtgtgcctgctgaacaacttctacccccgcgaggccaaggtgcagtggaaggtggacaacgccctgcagagcggcaacagccaggagagcgtgaccgagcaggactccaaggacagcacctacagcctgagcagcaccctgaccctgagcaaggccgactacgagaagcacaaggtgtacgcctgcgaggtgacccaccagggactgtctagccccgtgaccaagagcttcaaccggggcgagtgctaa

SEQ ID NO: 251 - protein, 234 aa, Artificial Sequence
  IgG1 light chain
METDTLLLWVLLLWVPGSTGDIQMTQSPSSLSASVGDRVTITCRASQSISNWLAWYQQKPGKAPKLLIYSASSLQNGVPSRFSGSGSGTDFTLTISSLQPEDFATYYCQQSYSTPPTFGQGTKVEIKRTVAAPSVFIFPPSDEQLKSGTASVVCLLNNFYPREAKVQWKVDNALQSGNSQESVTEQDSKDSTYSLSSTLTLSKADYEKHKVYACEVTHQGLSSPVTKSFNRGEC

SEQ ID NO: 252 - DNA, 717 bp, Artificial Sequence
  IgG1 light chain
atggagaccgacaccctgctgctctgggtgctgctgctctgggtgcccggctccaccggagacatcgtgatgacccagagtccactgagcttgcccgtgacgcccggagagcccgcctcaatcagctgcaggagcagccagagcctgctgcacagcaacggctacaactacctggactggtacctgcagaaacccggacagagcccccagctgctgatctacggcgccagcacactgcagcctggcgtgcccgacaggttcagcggcagcggctccggcaccgacttcaccctgaagataagcagggtggaggccgaggacgtgggcgtgtactactgtatgcaaggcacccagtggcccaccttcggccagggcactaagctggagatcaagaggaccgtggccgcccccagcgtgttcatcttccctcccagcgacgagcagctgaagtctggcaccgccagcgtggtgtgcctgctgaacaacttctacccccgcgaggccaaggtgcagtggaaggtggacaacgccctgcagagcggcaacagccaggagagcgtgaccgagcaggactccaaggacagcacctacagcctgagcagcaccctgaccctgagcaaggccgactacgagaagcacaaggtgtacgcctgcgaggtgacccaccagggactgtctagccccgtgaccaagagcttcaaccggggcgagtgctaa

SEQ ID NO: 253 - protein, 238 aa, Artificial Sequence
  IgG1 light chain
METDTLLLWVLLLWVPGSTGDIVMTQSPLSLPVTPGEPASISCRSSQSLLHSNGYNYLDWYLQKPGQSPQLLIYGASTLQPGVPDRFSGSGSGTDFTLKISRVEAEDVGVYYCMQGTQWPTFGQGTKLEIKRTVAAPSVFIFPPSDEQLKSGTASVVCLLNNFYPREAKVQWKVDNALQSGNSQESVTEQDSKDSTYSLSSTLTLSKADYEKHKVYACEVTHQGLSSPVTKSFNRGEC

SEQ ID NO: 254 - DNA, 720 bp, Artificial Sequence
  IgG1 light chain
atggagaccgacaccctgctgctctgggtgctgctgctctgggtgcccggctccaccggagacatcgtgatgacccagagcccactgagcctgcccgtgacccccggagagccggccagcatcagctgcaggagcagtcagagcttgctgcacagcaacggctacaactacctggactggtacctgcagaagcctggccaaagcccccagttgctgatctacgccgccagcaccttgcagagcggcgtgcccgacaggttctctggcagcgggagcggcaccgacttcaccctgaaaatcagcagggtcgaggccgaggacgtgggcgtgtactactgtatgcagggcacccattggcccctgaccttcggccaaggcactaaggtggagatcaagaggaccgtggccgcccccagcgtgttcatcttccctcccagcgacgagcagctgaagtctggcaccgccagcgtggtgtgcctgctgaacaacttctacccccgcgaggccaaggtgcagtggaaggtggacaacgccctgcagagcggcaacagccaggagagcgtgaccgagcaggactccaaggacagcacctacagcctgagcagcaccctgaccctgagcaaggccgactacgagaagcacaaggtgtacgcctgcgaggtgacccaccagggactgtctagccccgtgaccaagagcttcaaccggggcgagtgctaa

SEQ ID NO: 255 - protein, 239 aa, Artificial Sequence
  IgG1 light chain
METDTLLLWVLLLWVPGSTGDIVMTQSPLSLPVTPGEPASISCRSSQSLLHSNGYNYLDWYLQKPGQSPQLLIYAASTLQSGVPDRFSGSGSGTDFTLKISRVEAEDVGVYYCMQGTHWPLTFGQGTKVEIKRTVAAPSVFIFPPSDEQLKSGTASVVCLLNNFYPREAKVQWKVDNALQSGNSQESVTEQDSKDSTYSLSSTLTLSKADYEKHKVYACEVTHQGLSSPVTKSFNRGEC

SEQ ID NO: 256 - DNA, 705 bp, Artificial Sequence
  IgG1 light chain
atggagaccgacaccctgctgctctgggtgctgctgctctgggtgcccggctccaccggagacatccagatgacccagagccccagctccctgagcgccagcgtgggcgacagggtgacgatcacctgccaggccagccaggacatcaggaactacctgaactggtatcaacagaagcccggcaaggcccccaagttgctgatctacaaagccagcagcctggagagcggcgtgcccagcaggttcagcggcagtggcagcggcaccgacttcaccttgaccatcagcagtctgcagcccgaggacttcgccacctactactgccaacagagctacagcaccccacccaccttcggaggcggaactaaggtggagatcaagaggaccgtggccgcccccagcgtgttcatcttccctcccagcgacgagcagctgaagtctggcaccgccagcgtggtgtgcctgctgaacaacttctacccccgcgaggccaaggtgcagtggaaggtggacaacgccctgcagagcggcaacagccaggagagcgtgaccgagcaggactccaaggacagcacctacagcctgagcagcaccctgaccctgagcaaggccgactacgagaagcacaaggtgtacgcctgcgaggtgacccaccagggactgtctagccccgtgaccaagagcttcaaccggggcgagtgctaa

SEQ ID NO: 257 - protein, 234 aa, Artificial Sequence
  IgG1 light chain
METDTLLLWVLLLWVPGSTGDIQMTQSPSSLSASVGDRVTITCQASQDIRNYLNWYQQKPGKAPKLLIYKASSLESGVPSRFSGSGSGTDFTLTISSLQPEDFATYYCQQSYSTPPTFGGGTKVEIKRTVAAPSVFIFPPSDEQLKSGTASVVCLLNNFYPREAKVQWKVDNALQSGNSQESVTEQDSKDSTYSLSSTLTLSKADYEKHKVYACEVTHQGLSSPVTKSFNRGEC

SEQ ID NO: 258 - DNA, 720 bp, Artificial Sequence
  IgG1 light chain
atggagaccgacaccctgctgctctgggtgctgctgctctgggtgcccggctccaccggagacatcgtgatgacccagagtccactgagtctgcccgtgacccccggtgagccggccagcatcagctgcaggagcagccagagcctgctgcacagcaacggctacaactacctggactggtacctgcagaagccaggccagtctccccagctgttgatttacgccgccagtaccctgcaaagcggcgtgcccgacaggttcagcggcagcgggagcggcaccgacttcaccctgaagatcagcagggtggaggccgaggacgtgggcgtgtactactgtatgcagggcacccactggcccaccaccttcggccaaggcacaaggctggagatcaagaggaccgtggccgcccccagcgtgttcatcttccctcccagcgacgagcagctgaagtctggcaccgccagcgtggtgtgcctgctgaacaacttctacccccgcgaggccaaggtgcagtggaaggtggacaacgccctgcagagcggcaacagccaggagagcgtgaccgagcaggactccaaggacagcacctacagcctgagcagcaccctgaccctgagcaaggccgactacgagaagcacaaggtgtacgcctgcgaggtgacccaccagggactgtctagccccgtgaccaagagcttcaaccggggcgagtgctaa

SEQ ID NO: 259 - protein, 239 aa, Artificial Sequence
  IgG1 light chain
METDTLLLWVLLLWVPGSTGDIVMTQSPLSLPVTPGEPASISCRSSQSLLHSNGYNYLDWYLQKPGQSPQLLIYAASTLQSGVPDRFSGSGSGTDFTLKISRVEAEDVGVYYCMQGTHWPTTFGQGTRLEIKRTVAAPSVFIFPPSDEQLKSGTASVVCLLNNFYPREAKVQWKVDNALQSGNSQESVTEQDSKDSTYSLSSTLTLSKADYEKHKVYACEVTHQGLSSPVTKSFNRGEC

SEQ ID NO: 260 - DNA, 705 bp, Artificial Sequence
  IgG1 light chain
atggagaccgacaccctgctgctctgggtgctgctgctctgggtgcccggctccaccggagacatccagatgacccagagccccagctccctgagcgccagcgtgggcgacagggtgaccatcacctgccaggccagcgaggacatcgccaacaacctgaactggtatcagcagaagcccggcaaggcccccaaacttctgatctacgccgccagcagcctgcagagcggcgtgcccagtaggttcagcggcagcggaagtggcaccgacttcaccctcaccattagcagtctccagcccgaggacttcgccacatactactgccagcaaggctacaacatccccttcaccttcggccagggcaccaagttggagatcaagaggaccgtggccgcccccagcgtgttcatcttccctcccagcgacgagcagctgaagtctggcaccgccagcgtggtgtgcctgctgaacaacttctacccccgcgaggccaaggtgcagtggaaggtggacaacgccctgcagagcggcaacagccaggagagcgtgaccgagcaggactccaaggacagcacctacagcctgagcagcaccctgaccctgagcaaggccgactacgagaagcacaaggtgtacgcctgcgaggtgacccaccagggactgtctagccccgtgaccaagagcttcaaccggggcgagtgctaa

SEQ ID NO: 261 - protein, 234 aa, Artificial Sequence
  IgG1 light chain
METDTLLLWVLLLWVPGSTGDIQMTQSPSSLSASVGDRVTITCQASEDIANNLNWYQQKPGKAPKLLIYAASSLQSGVPSRFSGSGSGTDFTLTISSLQPEDFATYYCQQGYNIPFTFGQGTKLEIKRTVAAPSVFIFPPSDEQLKSGTASVVCLLNNFYPREAKVQWKVDNALQSGNSQESVTEQDSKDSTYSLSSTLTLSKADYEKHKVYACEVTHQGLSSPVTKSFNRGEC

SEQ ID NO: 262 - DNA, 705 bp, Artificial Sequence
  IgG1 light chain
atggagaccgacaccctgctgctctgggtgctgctgctctgggtgcccggctccaccggagacatccagatgacccagagccccagcagcctcagtgccagcgtgggcgacagggtgaccatcacctgccgagtgagccagggcataagcaactacctgaactggtatcagcagaagcccggcaaggcccccaagttgctgatctacggcgccagcactctgcaaagcggcgtgccctctaggttcagcggcagcggtagcggcaccgacttcaccctcaccatctcaagcctgcagcccgaggacttcgccacctactactgccaacagagctacagcaccccctggaccttcggtcccggtaccaaggtggacatcaagaggaccgtggccgcccccagcgtgttcatcttccctcccagcgacgagcagctgaagtctggcaccgccagcgtggtgtgcctgctgaacaacttctacccccgcgaggccaaggtgcagtggaaggtggacaacgccctgcagagcggcaacagccaggagagcgtgaccgagcaggactccaaggacagcacctacagcctgagcagcaccctgaccctgagcaaggccgactacgagaagcacaaggtgtacgcctgcgaggtgacccaccagggactgtctagccccgtgaccaagagcttcaaccggggcgagtgctaa

SEQ ID NO: 263 - protein, 234 aa, Artificial Sequence
  IgG1 light chain
METDTLLLWVLLLWVPGSTGDIQMTQSPSSLSASVGDRVTITCRVSQGISNYLNWYQQKPGKAPKLLIYGASTLQSGVPSRFSGSGSGTDFTLTISSLQPEDFATYYCQQSYSTPWTFGPGTKVDIKRTVAAPSVFIFPPSDEQLKSGTASVVCLLNNFYPREAKVQWKVDNALQSGNSQESVTEQDSKDSTYSLSSTLTLSKADYEKHKVYACEVTHQGLSSPVTKSFNRGEC

SEQ ID NO: 264 - DNA, 720 bp, Artificial Sequence
  IgG1 light chain
atggagaccgacaccctgctgctctgggtgctgctgctctgggtgcccggctccaccggagacatcgtgatgacccagagcccactgagtctgcctgtgacgccgggtgagcccgccagcatcagctgcaggagctcacagagcctgctgcacagcaacggctacaactacctggactggtacttgcagaagcctggccaaagcccccagctgctgatctatctggctagcaacagggccagcggcgtgcccgacaggttcagcggcagcgggagcggcaccgacttcaccctgaagatctcaagggtggaggccgaggacgtgggcgtgtactactgtatgcaagccctgcagacccccgtgaccttcggccagtctaccaggctggagatcaagaggaccgtggccgcccccagcgtgttcatcttccctcccagcgacgagcagctgaagtctggcaccgccagcgtggtgtgcctgctgaacaacttctacccccgcgaggccaaggtgcagtggaaggtggacaacgccctgcagagcggcaacagccaggagagcgtgaccgagcaggactccaaggacagcacctacagcctgagcagcaccctgaccctgagcaaggccgactacgagaagcacaaggtgtacgcctgcgaggtgacccaccagggactgtctagccccgtgaccaagagcttcaaccggggcgagtgctaa

SEQ ID NO: 265 - protein, 239 aa, Artificial Sequence
  IgG1 light chain
METDTLLLWVLLLWVPGSTGDIVMTQSPLSLPVTPGEPASISCRSSQSLLHSNGYNYLDWYLQKPGQSPQLLIYLASNRASGVPDRFSGSGSGTDFTLKISRVEAEDVGVYYCMQALQTPVTFGQSTRLEIKRTVAAPSVFIFPPSDEQLKSGTASVVCLLNNFYPREAKVQWKVDNALQSGNSQESVTEQDSKDSTYSLSSTLTLSKADYEKHKVYACEVTHQGLSSPVTKSFNRGEC

SEQ ID NO: 266 - DNA, 720 bp, Artificial Sequence
  IgG1 light chain
atggagaccgacaccctgctgctctgggtgctgctgctctgggtgcccggctccaccggagacatcgtgatgacccagagtcccctgagcctgcccgtgacccccggtgaacccgcctccatcagctgcaggagctcacaaagcctgctgcacagcaacggctacaactacctggactggtacctgcagaagcccggtcaaagcccccagctgctgatctacgacgccagcaacctggagaccggcgtgcccgacaggttcagcggaagcggcagcgggaccgacttcaccctgaagattagcagggtggaggccgaggacgtgggcgtgtactactgtatgcaaggcgcccactggccccctactttcggccagggcaccaagctggagatcaagaggaccgtggccgcccccagcgtgttcatcttccctcccagcgacgagcagctgaagtctggcaccgccagcgtggtgtgcctgctgaacaacttctacccccgcgaggccaaggtgcagtggaaggtggacaacgccctgcagagcggcaacagccaggagagcgtgaccgagcaggactccaaggacagcacctacagcctgagcagcaccctgaccctgagcaaggccgactacgagaagcacaaggtgtacgcctgcgaggtgacccaccagggactgtctagccccgtgaccaagagcttcaaccggggcgagtgctaa

SEQ ID NO: 267 - protein, 239 aa, Artificial Sequence
  IgG1 light chain
METDTLLLWVLLLWVPGSTGDIVMTQSPLSLPVTPGEPASISCRSSQSLLHSNGYNYLDWYLQKPGQSPQLLIYDASNLETGVPDRFSGSGSGTDFTLKISRVEAEDVGVYYCMQGAHWPPTFGQGTKLEIKRTVAAPSVFIFPPSDEQLKSGTASVVCLLNNFYPREAKVQWKVDNALQSGNSQESVTEQDSKDSTYSLSSTLTLSKADYEKHKVYACEVTHQGLSSPVTKSFNRGEC

SEQ ID NO: 268 - DNA, 705 bp, Artificial Sequence
  IgG1 light chain
atggagaccgacaccctgctgctctgggtgctgctgctctgggtgcccggctccaccggagacatccagatgacccagagccctagcagcctgagcgccagcgtgggcgacagggtgaccatcacctgccaggccagccagggtatcagcaactacctgaattggtatcaacagaagcccggcaaggcccccaagctgctgatttacgccgcctcaaccctgcagagcggcgtgcccagcaggttcagcggcagcgggagcggcaccgactttaccctgacgattagcagtttgcagcccgaggacttcgccacctactactgccaacagagctacagcactcctcccaccttcggccagggcactaaggtggagatcaagaggaccgtggccgcccccagcgtgttcatcttccctcccagcgacgagcagctgaagtctggcaccgccagcgtggtgtgcctgctgaacaacttctacccccgcgaggccaaggtgcagtggaaggtggacaacgccctgcagagcggcaacagccaggagagcgtgaccgagcaggactccaaggacagcacctacagcctgagcagcaccctgaccctgagcaaggccgactacgagaagcacaaggtgtacgcctgcgaggtgacccaccagggactgtctagccccgtgaccaagagcttcaaccggggcgagtgctaa

SEQ ID NO: 269 - protein, 234 aa, Artificial Sequence
  IgG1 light chain
METDTLLLWVLLLWVPGSTGDIQMTQSPSSLSASVGDRVTITCQASQGISNYLNWYQQKPGKAPKLLIYAASTLQSGVPSRFSGSGSGTDFTLTISSLQPEDFATYYCQQSYSTPPTFGQGTKVEIKRTVAAPSVFIFPPSDEQLKSGTASVVCLLNNFYPREAKVQWKVDNALQSGNSQESVTEQDSKDSTYSLSSTLTLSKADYEKHKVYACEVTHQGLSSPVTKSFNRGEC

SEQ ID NO: 270 - DNA, 705 bp, Artificial Sequence
  IgG1 light chain
atggagaccgacaccctgctgctctgggtgctgctgctctgggtgcccggctccaccggagagatcgtgatgacccagagccccgctactctgagcgtgtcacccggcgagagggccaccttgagctgcagggccagccagagcgtgagcagcaacttcgcctggtatcagcagaagcccggtcaagcccccaggttgctgatctacggcgccagcaccagggctaccggcatccccgccaggttcagcggcagcggaagcggcaccgagttcaccctgaccatcagtagcctgcagagcgaggactttgccgtgtactactgccagcagtactacagcaccccctacaccttcggccagggaaccaaagtggagatcaagaggaccgtggccgcccccagcgtgttcatcttccctcccagcgacgagcagctgaagtctggcaccgccagcgtggtgtgcctgctgaacaacttctacccccgcgaggccaaggtgcagtggaaggtggacaacgccctgcagagcggcaacagccaggagagcgtgaccgagcaggactccaaggacagcacctacagcctgagcagcaccctgaccctgagcaaggccgactacgagaagcacaaggtgtacgcctgcgaggtgacccaccagggactgtctagccccgtgaccaagagcttcaaccggggcgagtgctaa

SEQ ID NO: 271 - protein, 234 aa, Artificial Sequence
  IgG1 light chain
METDTLLLWVLLLWVPGSTGEIVMTQSPATLSVSPGERATLSCRASQSVSSNFAWYQQKPGQAPRLLIYGASTRATGIPARFSGSGSGTEFTLTISSLQSEDFAVYYCQQYYSTPYTFGQGTKVEIKRTVAAPSVFIFPPSDEQLKSGTASVVCLLNNFYPREAKVQWKVDNALQSGNSQESVTEQDSKDSTYSLSSTLTLSKADYEKHKVYACEVTHQGLSSPVTKSFNRGEC

SEQ ID NO: 272 - DNA, 705 bp, Artificial Sequence
  IgG1 light chain
atggagaccgacaccctgctgctctgggtgctgctgctctgggtgcccggctccaccggagacatccagatgacccagagccccagctctctgagcgccagcgtgggcgacagggtgacgatcacctgccgagccagccaaagcatcagcacctggcttgcctggtatcaacagaagcccggcaaggcccccaagctgctgatctacggcgcctctagcctgcagagcggtgtgcccagcaggttcagcggcagtggcagcggcaccgacttcacactgaccatcagctccctgcagcccgaggacttcgccacctactactgccagcagtcttacaacagcccctacacgtttggccagggcaccaaggtggagatcaagaggaccgtggccgcccccagcgtgttcatcttccctcccagcgacgagcagctgaagtctggcaccgccagcgtggtgtgcctgctgaacaacttctacccccgcgaggccaaggtgcagtggaaggtggacaacgccctgcagagcggcaacagccaggagagcgtgaccgagcaggactccaaggacagcacctacagcctgagcagcaccctgaccctgagcaaggccgactacgagaagcacaaggtgtacgcctgcgaggtgacccaccagggactgtctagccccgtgaccaagagcttcaaccggggcgagtgctaa

SEQ ID NO: 273 - protein, 234 aa, Artificial Sequence
  IgG1 light chain
METDTLLLWVLLLWVPGSTGDIQMTQSPSSLSASVGDRVTITCRASQSISTWLAWYQQKPGKAPKLLIYGASSLQSGVPSRFSGSGSGTDFTLTISSLQPEDFATYYCQQSYNSPYTFGQGTKVEIKRTVAAPSVFIFPPSDEQLKSGTASVVCLLNNFYPREAKVQWKVDNALQSGNSQESVTEQDSKDSTYSLSSTLTLSKADYEKHKVYACEVTHQGLSSPVTKSFNRGEC

SEQ ID NO: 274 - DNA, 705 bp, Artificial Sequence
  IgG1 light chain
atggagaccgacaccctgctgctctgggtgctgctgctctgggtgcccggctccaccggagacatccagatgacccagagccctagcagcctgagcgccagcgtgggcgacagggtgaccatcacctgccgagccagccagagcatcagcagctacctgaactggtatcagcaaaagcccggcaaggcccccaaactcctgatctacgccgcctcctctctgcaaagcggcgtgcccagcaggttcagcgggagcggcagcggcaccgactttacccttaccatcagtagcctgcagcccgaggacttcgccacctactactgccagcagagctacagcacccccttgaccttcggaggaggtactaaggtggagatcaagaggaccgtggccgcccccagcgtgttcatcttccctcccagcgacgagcagctgaagtctggcaccgccagcgtggtgtgcctgctgaacaacttctacccccgcgaggccaaggtgcagtggaaggtggacaacgccctgcagagcggcaacagccaggagagcgtgaccgagcaggactccaaggacagcacctacagcctgagcagcaccctgaccctgagcaaggccgactacgagaagcacaaggtgtacgcctgcgaggtgacccaccagggactgtctagccccgtgaccaagagcttcaaccggggcgagtgctaa

SEQ ID NO: 275 - protein, 234 aa, Artificial Sequence
  IgG1 light chain
METDTLLLWVLLLWVPGSTGDIQMTQSPSSLSASVGDRVTITCRASQSISSYLNWYQQKPGKAPKLLIYAASSLQSGVPSRFSGSGSGTDFTLTISSLQPEDFATYYCQQSYSTPLTFGGGTKVEIKRTVAAPSVFIFPPSDEQLKSGTASVVCLLNNFYPREAKVQWKVDNALQSGNSQESVTEQDSKDSTYSLSSTLTLSKADYEKHKVYACEVTHQGLSSPVTKSFNRGEC

SEQ ID NO: 276 - DNA, 705 bp, Artificial Sequence
  IgG1 light chain
atggagaccgacaccctgctgctctgggtgctgctgctctgggtgcccggctccaccggagacatccagatgacccagagccccagcagtctcagcgccagcgtgggcgacagggttaccatcacctgccgagccagccaggacatcggcagctggcttgcctggtatcaacagaagcccggcaaggcccccaagctgctgatctacgccgccagcagcctgcagagcggcgtgcccagtaggttcagcggtagcggcagcggcaccgacttcaccctgaccattagctccctgcagcccgaggacttcgccacctactactgccagcaaagctacagcaccccacccactttcggccagggcaccaaggtggagatcaagaggaccgtggccgcccccagcgtgttcatcttccctcccagcgacgagcagctgaagtctggcaccgccagcgtggtgtgcctgctgaacaacttctacccccgcgaggccaaggtgcagtggaaggtggacaacgccctgcagagcggcaacagccaggagagcgtgaccgagcaggactccaaggacagcacctacagcctgagcagcaccctgaccctgagcaaggccgactacgagaagcacaaggtgtacgcctgcgaggtgacccaccagggactgtctagccccgtgaccaagagcttcaaccggggcgagtgctaa

SEQ ID NO: 277 - protein, 234 aa, Artificial Sequence
  IgG1 light chain
METDTLLLWVLLLWVPGSTGDIQMTQSPSSLSASVGDRVTITCRASQDIGSWLAWYQQKPGKAPKLLIYAASSLQSGVPSRFSGSGSGTDFTLTISSLQPEDFATYYCQQSYSTPPTFGQGTKVEIKRTVAAPSVFIFPPSDEQLKSGTASVVCLLNNFYPREAKVQWKVDNALQSGNSQESVTEQDSKDSTYSLSSTLTLSKADYEKHKVYACEVTHQGLSSPVTKSFNRGEC

SEQ ID NO: 278 - DNA, 705 bp, Artificial Sequence
  IgG1 light chain
atggagaccgacaccctgctgctctgggtgctgctgctctgggtgcccggctccaccggagacatccagatgacccagagccccagtagcctgagcgccagcgtgggcgacagggtgacaatcacctgtagggcgagccagagcataagcagctggctggcctggtatcaacagaagcccggcaaagcccccaagctgctgatctacgacgccagcaacctgaagaccggcgtgcccagcaggttcagcggctccggcagcggcaccgacttcaccttgaccatcagctccctgcagcccgaggacttcgccacctactactgccagcagacctacgccatccccctgaccttcggtggcggcactaaggtggagatcaagaggaccgtggccgcccccagcgtgttcatcttccctcccagcgacgagcagctgaagtctggcaccgccagcgtggtgtgcctgctgaacaacttctacccccgcgaggccaaggtgcagtggaaggtggacaacgccctgcagagcggcaacagccaggagagcgtgaccgagcaggactccaaggacagcacctacagcctgagcagcaccctgaccctgagcaaggccgactacgagaagcacaaggtgtacgcctgcgaggtgacccaccagggactgtctagccccgtgaccaagagcttcaaccggggcgagtgctaa

SEQ ID NO: 279 - protein, 234 aa, Artificial Sequence
  IgG1 light chain
METDTLLLWVLLLWVPGSTGDIQMTQSPSSLSASVGDRVTITCRASQSISSWLAWYQQKPGKAPKLLIYDASNLKTGVPSRFSGSGSGTDFTLTISSLQPEDFATYYCQQTYAIPLTFGGGTKVEIKRTVAAPSVFIFPPSDEQLKSGTASVVCLLNNFYPREAKVQWKVDNALQSGNSQESVTEQDSKDSTYSLSSTLTLSKADYEKHKVYACEVTHQGLSSPVTKSFNRGEC

SEQ ID NO: 280 - DNA, 705 bp, Artificial Sequence
  IgG1 light chain
atggagaccgacaccctgctgctctgggtgctgctgctctgggtgcccggctccaccggagacatccagatgacccagtctcctagcagcctgagcgccagcgtgggcgacagggtgaccattacctgtagggcctcacagggcattagcagctggctggcctggtatcagcagaagcccggcaaggcccccaagctgcttatctacgaggccagtcacctggagaccggcgtgcccagcaggttcagcggcagcggctctggaaccgacttcaccttgaccatcagctccttgcagcccgaggacttcgccacctactactgcctgcaagattacaactaccccctgaccttcggcggagggactaaggtggagatcaagaggaccgtggccgcccccagcgtgttcatcttccctcccagcgacgagcagctgaagtctggcaccgccagcgtggtgtgcctgctgaacaacttctacccccgcgaggccaaggtgcagtggaaggtggacaacgccctgcagagcggcaacagccaggagagcgtgaccgagcaggactccaaggacagcacctacagcctgagcagcaccctgaccctgagcaaggccgactacgagaagcacaaggtgtacgcctgcgaggtgacccaccagggactgtctagccccgtgaccaagagcttcaaccggggcgagtgctaa

SEQ ID NO: 281 - protein, 234 aa, Artificial Sequence
  IgG1 light chain
METDTLLLWVLLLWVPGSTGDIQMTQSPSSLSASVGDRVTITCRASQGISSWLAWYQQKPGKAPKLLIYEASHLETGVPSRFSGSGSGTDFTLTISSLQPEDFATYYCLQDYNYPLTFGGGTKVEIKRTVAAPSVFIFPPSDEQLKSGTASVVCLLNNFYPREAKVQWKVDNALQSGNSQESVTEQDSKDSTYSLSSTLTLSKADYEKHKVYACEVTHQGLSSPVTKSFNRGEC

SEQ ID NO: 282 - DNA, 705 bp, Artificial Sequence
  IgG1 light chain
atggagaccgacaccctgctgctctgggtgctgctgctctgggtgcccggctccaccggagacatccagatgacccagagccccagcagcctgagcgccagcgtgggcgacagagtgaccatcacctgtcgagccagcgagagcatcggcaggtatctgaattggtatcagcagaagcccggcaaggccccaaagctgctcatctacggcaccagcaacctggagagcggcgtgcctagcaggtttagcggcagcggaagcggaaccgacttcaccctgactatctccagcctgcagcccgaggacttcgccacctactactgccaacagagctacagcactcccccaactttcggccagggcaccaaggtggagatcaagaggaccgtggccgcccccagcgtgttcatcttccctcccagcgacgagcagctgaagtctggcaccgccagcgtggtgtgcctgctgaacaacttctacccccgcgaggccaaggtgcagtggaaggtggacaacgccctgcagagcggcaacagccaggagagcgtgaccgagcaggactccaaggacagcacctacagcctgagcagcaccctgaccctgagcaaggccgactacgagaagcacaaggtgtacgcctgcgaggtgacccaccagggactgtctagccccgtgaccaagagcttcaaccggggcgagtgctaa

SEQ ID NO: 283 - protein, 234 aa, Artificial Sequence
  IgG1 light chain
METDTLLLWVLLLWVPGSTGDIQMTQSPSSLSASVGDRVTITCRASESIGRYLNWYQQKPGKAPKLLIYGTSNLESGVPSRFSGSGSGTDFTLTISSLQPEDFATYYCQQSYSTPPTFGQGTKVEIKRTVAAPSVFIFPPSDEQLKSGTASVVCLLNNFYPREAKVQWKVDNALQSGNSQESVTEQDSKDSTYSLSSTLTLSKADYEKHKVYACEVTHQGLSSPVTKSFNRGEC

SEQ ID NO: 284 - DNA, 705 bp, Artificial Sequence
  IgG1 light chain
atggagaccgacaccctgctgctctgggtgctgctgctctgggtgcccggctccaccggagacatccagatgacccagagccccagcagtctcagcgccagcgtgggcgacagggtaaccatcacctgccaggcgagccaggacatcggcagctacctgaactggtatcaacagaagcccggcaaggcccccaagctgctgatctacgccgcgagctcactgcagagcggcgtccccagtaggttcagtggaagcggcagcggcacagacttcaccctgaccatctccagcctgcagcccgaggacttcgccacctactactgtctccagagctacagcacccccttcaccttcggtggcggcactaaggtggagatcaagaggaccgtggccgcccccagcgtgttcatcttccctcccagcgacgagcagctgaagtctggcaccgccagcgtggtgtgcctgctgaacaacttctacccccgcgaggccaaggtgcagtggaaggtggacaacgccctgcagagcggcaacagccaggagagcgtgaccgagcaggactccaaggacagcacctacagcctgagcagcaccctgaccctgagcaaggccgactacgagaagcacaaggtgtacgcctgcgaggtgacccaccagggactgtctagccccgtgaccaagagcttcaaccggggcgagtgctaa

SEQ ID NO: 285 - protein, 234 aa, Artificial Sequence
  IgG1 light chain
METDTLLLWVLLLWVPGSTGDIQMTQSPSSLSASVGDRVTITCQASQDIGSYLNWYQQKPGKAPKLLIYAASSLQSGVPSRFSGSGSGTDFTLTISSLQPEDFATYYCLQSYSTPFTFGGGTKVEIKRTVAAPSVFIFPPSDEQLKSGTASVVCLLNNFYPREAKVQWKVDNALQSGNSQESVTEQDSKDSTYSLSSTLTLSKADYEKHKVYACEVTHQGLSSPVTKSFNRGEC

SEQ ID NO: 286 - DNA, 720 bp, Artificial Sequence
  IgG1 light chain
atggagaccgacaccctgctgctctgggtgctgctgctctgggtgcccggctccaccggagacatcgtgatgacccagagccccctgagcctgcccgtgacccctggcgagcccgccagcatcagctgcaggagcagccaaagcctgctgcacagcaacggctacaactacctggactggtacctgcagaaacccggccagtcaccgcaactgctgatctacctcgctagcaacagggccagcggcgtgcccgacaggttctctggcagcgggagcggcactgacttcaccctgaagattagcagggtggaggccgaggacgtgggcgtgtactactgtatgcaagccttgcagactcccccaacattcggccctggaaccaaggtggacatcaagaggaccgtggccgcccccagcgtgttcatcttccctcccagcgacgagcagctgaagtctggcaccgccagcgtggtgtgcctgctgaacaacttctacccccgcgaggccaaggtgcagtggaaggtggacaacgccctgcagagcggcaacagccaggagagcgtgaccgagcaggactccaaggacagcacctacagcctgagcagcaccctgaccctgagcaaggccgactacgagaagcacaaggtgtacgcctgcgaggtgacccaccagggactgtctagccccgtgaccaagagcttcaaccggggcgagtgctaa

SEQ ID NO: 287 - protein, 239 aa, Artificial Sequence
  IgG1 light chain
METDTLLLWVLLLWVPGSTGDIVMTQSPLSLPVTPGEPASISCRSSQSLLHSNGYNYLDWYLQKPGQSPQLLIYLASNRASGVPDRFSGSGSGTDFTLKISRVEAEDVGVYYCMQALQTPPTFGPGTKVDIKRTVAAPSVFIFPPSDEQLKSGTASVVCLLNNFYPREAKVQWKVDNALQSGNSQESVTEQDSKDSTYSLSSTLTLSKADYEKHKVYACEVTHQGLSSPVTKSFNRGEC

SEQ ID NO: 288 - DNA, 705 bp, Artificial Sequence
  IgG1 light chain
atggagaccgacaccctgctgctctgggtgctgctgctctgggtgcccggctccaccggagacatccagatgacccagagcccaagcagcctgagcgccagcgtgggcgacagggttaccatcacgtgcagggccagccagggcatcaggagcaacctggactggtatcaacagaagcccggcaaggcccccaagctgcttatcagcatcgtgtctaacctgggtagcggcgtgcccagcaggtttagcggcagcggctccggaaccgacttcaccctgaccatcagtagcctgcagcccgaggacttcgccacctactactgcttgcagcacaacagcaatccacccacattcggtggcggcacaaaagtggaaatcaagaggaccgtggccgcccccagcgtgttcatcttccctcccagcgacgagcagctgaagtctggcaccgccagcgtggtgtgcctgctgaacaacttctacccccgcgaggccaaggtgcagtggaaggtggacaacgccctgcagagcggcaacagccaggagagcgtgaccgagcaggactccaaggacagcacctacagcctgagcagcaccctgaccctgagcaaggccgactacgagaagcacaaggtgtacgcctgcgaggtgacccaccagggactgtctagccccgtgaccaagagcttcaaccggggcgagtgctaa

SEQ ID NO: 289 - protein, 234 aa, Artificial Sequence
  IgG1 light chain
METDTLLLWVLLLWVPGSTGDIQMTQSPSSLSASVGDRVTITCRASQGIRSNLDWYQQKPGKAPKLLISIVSNLGSGVPSRFSGSGSGTDFTLTISSLQPEDFATYYCLQHNSNPPTFGGGTKVEIKRTVAAPSVFIFPPSDEQLKSGTASVVCLLNNFYPREAKVQWKVDNALQSGNSQESVTEQDSKDSTYSLSSTLTLSKADYEKHKVYACEVTHQGLSSPVTKSFNRGEC

SEQ ID NO: 290 - DNA, 723 bp, Artificial Sequence
  IgG1 light chain
atggagaccgacaccctgctgctctgggtgctgctgctctgggtgcccggctccaccggagacatcgtgatgacccagagccccgacagcctggctgtgagcctgggcgagagggccaccatcaactgcaagagcagccagagcgtgttctacagcagcatcaacaagaactctctggcctggtatcagcagaagcccggtcagcccccaaagctcctgatctactgggccagcaccagggagagcggcgtgcccgataggttcagtggctcaggcagcggaaccgacttcaccctgacaatcagctctctgcaggcagaggacgtggccgtgtactactgccagcagtattacagcacccctctgaccttcggccagtctaccaaggtggagatcaagaggaccgtggccgcccccagcgtgttcatcttccctcccagcgacgagcagctgaagtctggcaccgccagcgtggtgtgcctgctgaacaacttctacccccgcgaggccaaggtgcagtggaaggtggacaacgccctgcagagcggcaacagccaggagagcgtgaccgagcaggactccaaggacagcacctacagcctgagcagcaccctgaccctgagcaaggccgactacgagaagcacaaggtgtacgcctgcgaggtgacccaccagggactgtctagccccgtgaccaagagcttcaaccggggcgagtgctaa

SEQ ID NO: 291 - protein, 240 aa, Artificial Sequence
  IgG1 light chain
METDTLLLWVLLLWVPGSTGDIVMTQSPDSLAVSLGERATINCKSSQSVFYSSINKNSLAWYQQKPGQPPKLLIYWASTRESGVPDRFSGSGSGTDFTLTISSLQAEDVAVYYCQQYYSTPLTFGQSTKVEIKRTVAAPSVFIFPPSDEQLKSGTASVVCLLNNFYPREAKVQWKVDNALQSGNSQESVTEQDSKDSTYSLSSTLTLSKADYEKHKVYACEVTHQGLSSPVTKSFNRGEC

SEQ ID NO: 292 - DNA, 705 bp, Artificial Sequence
  IgG1 light chain
atggagaccgacaccctgctgctctgggtgctgctgctctgggtgcccggctccaccggagacatccagatgacccagagccccagcagcctcagcgccagcgtgggcgacagggtgaccatcacctgtagggccagccagaacatcggctacttcctgcactggtatcaacagaagcccggcaaggcccccaagctgctgatctacgccgccagctcactgcagagcggcgtgcccagtaggtttagcggtagcggcagtggcaccgacttcaccttgactatcagtagcctgcagcccgaggacttcgccacctactactgccagcagtcctacagccctcccctcaccttcggcggagggactaaggtggagatcaagaggaccgtggccgcccccagcgtgttcatcttccctcccagcgacgagcagctgaagtctggcaccgccagcgtggtgtgcctgctgaacaacttctacccccgcgaggccaaggtgcagtggaaggtggacaacgccctgcagagcggcaacagccaggagagcgtgaccgagcaggactccaaggacagcacctacagcctgagcagcaccctgaccctgagcaaggccgactacgagaagcacaaggtgtacgcctgcgaggtgacccaccagggactgtctagccccgtgaccaagagcttcaaccggggcgagtgctaa

SEQ ID NO: 293 - protein, 234 aa, Artificial Sequence
  IgG1 light chain
METDTLLLWVLLLWVPGSTGDIQMTQSPSSLSASVGDRVTITCRASQNIGYFLHWYQQKPGKAPKLLIYAASSLQSGVPSRFSGSGSGTDFTLTISSLQPEDFATYYCQQSYSPPLTFGGGTKVEIKRTVAAPSVFIFPPSDEQLKSGTASVVCLLNNFYPREAKVQWKVDNALQSGNSQESVTEQDSKDSTYSLSSTLTLSKADYEKHKVYACEVTHQGLSSPVTKSFNRGEC

SEQ ID NO: 294 - DNA, 720 bp, Artificial Sequence
  IgG1 light chain
atggagaccgacaccctgctgctctgggtgctgctgctctgggtgcccggctccaccggagacatcgtgatgacccagagccctctgagcctgcccgtgaccccgggtgaacccgccagcatcagctgcaggagcagccaaagcctgctccacagcaacggctacaactacctggactggtaccttcagaagcccggtcagagtccccagctgctgatctacggcgcctcaacactgcagagcggcgtgcccgacaggttcagcggcagcggaagcggcaccgacttcaccctgaagattagcagggtggaggccgaggacgtgggcgtttactactgtatgcaggccctgcagaaccccctgaccttcggagggggcaccaaggtggagattaagaggaccgtggccgcccccagcgtgttcatcttccctcccagcgacgagcagctgaagtctggcaccgccagcgtggtgtgcctgctgaacaacttctacccccgcgaggccaaggtgcagtggaaggtggacaacgccctgcagagcggcaacagccaggagagcgtgaccgagcaggactccaaggacagcacctacagcctgagcagcaccctgaccctgagcaaggccgactacgagaagcacaaggtgtacgcctgcgaggtgacccaccagggactgtctagccccgtgaccaagagcttcaaccggggcgagtgctaa

SEQ ID NO: 295 - protein, 239 aa, Artificial Sequence
  IgG1 light chain
METDTLLLWVLLLWVPGSTGDIVMTQSPLSLPVTPGEPASISCRSSQSLLHSNGYNYLDWYLQKPGQSPQLLIYGASTLQSGVPDRFSGSGSGTDFTLKISRVEAEDVGVYYCMQALQNPLTFGGGTKVEIKRTVAAPSVFIFPPSDEQLKSGTASVVCLLNNFYPREAKVQWKVDNALQSGNSQESVTEQDSKDSTYSLSSTLTLSKADYEKHKVYACEVTHQGLSSPVTKSFNRGEC

SEQ ID NO: 296 - DNA, 705 bp, Artificial Sequence
  IgG1 light chain
atggagaccgacaccctgctgctctgggtgctgctgctctgggtgcccggctccaccggagacatccagatgacccagagccccagcagcctgagcgccagcgtgggcgacagggtgacaatcacctgccgagcgagccagagtatcagcagctggctggcctggtatcaacaaaagcccggcaaggcccccaagctgttgatctacgacgccaccaacctggagaccggcgtgccgagtaggttcagcggcagtggcagcggcaccgactttacactgaccatcagctccctgcagcccgaggacttcgccacctactactgcctgcaagactacaactaccccctgaccttcggccagagcactaaggtggagatcaagaggaccgtggccgcccccagcgtgttcatcttccctcccagcgacgagcagctgaagtctggcaccgccagcgtggtgtgcctgctgaacaacttctacccccgcgaggccaaggtgcagtggaaggtggacaacgccctgcagagcggcaacagccaggagagcgtgaccgagcaggactccaaggacagcacctacagcctgagcagcaccctgaccctgagcaaggccgactacgagaagcacaaggtgtacgcctgcgaggtgacccaccagggactgtctagccccgtgaccaagagcttcaaccggggcgagtgctaa

SEQ ID NO: 297 - protein, 234 aa, Artificial Sequence
  IgG1 light chain
METDTLLLWVLLLWVPGSTGDIQMTQSPSSLSASVGDRVTITCRASQSISSWLAWYQQKPGKAPKLLIYDATNLETGVPSRFSGSGSGTDFTLTISSLQPEDFATYYCLQDYNYPLTFGQSTKVEIKRTVAAPSVFIFPPSDEQLKSGTASVVCLLNNFYPREAKVQWKVDNALQSGNSQESVTEQDSKDSTYSLSSTLTLSKADYEKHKVYACEVTHQGLSSPVTKSFNRGEC

SEQ ID NO: 298 - DNA, 720 bp, Artificial Sequence
  IgG1 light chain
atggagaccgacaccctgctgctctgggtgctgctgctctgggtgcccggctccaccggagacatcgtgatgacccaaagcccactgagcctgcccgtgacccctggcgagccggccagcatcagctgcaggagcagccagagcctgttgcacagcaacggctacaactacctggactggtacctgcagaagccaggccagagtccccagctgctgatatacgccgccagcaatctgcaatcaggcgtgcccgacaggttcagcggcagcggctccggcaccgacttcaccctgaagatcagccgcgtggaggccgaggacgtgggcgtgtactactgtatgcaggccctgcaaacacccatcaccttcggccaatctaccaggctggagatcaagaggaccgtggccgcccccagcgtgttcatcttccctcccagcgacgagcagctgaagtctggcaccgccagcgtggtgtgcctgctgaacaacttctacccccgcgaggccaaggtgcagtggaaggtggacaacgccctgcagagcggcaacagccaggagagcgtgaccgagcaggactccaaggacagcacctacagcctgagcagcaccctgaccctgagcaaggccgactacgagaagcacaaggtgtacgcctgcgaggtgacccaccagggactgtctagccccgtgaccaagagcttcaaccggggcgagtgctaa

SEQ ID NO: 299 - protein, 239 aa, Artificial Sequence
  IgG1 light chain
METDTLLLWVLLLWVPGSTGDIVMTQSPLSLPVTPGEPASISCRSSQSLLHSNGYNYLDWYLQKPGQSPQLLIYAASNLQSGVPDRFSGSGSGTDFTLKISRVEAEDVGVYYCMQALQTPITFGQSTRLEIKRTVAAPSVFIFPPSDEQLKSGTASVVCLLNNFYPREAKVQWKVDNALQSGNSQESVTEQDSKDSTYSLSSTLTLSKADYEKHKVYACEVTHQGLSSPVTKSFNRGEC

SEQ ID NO: 300 - DNA, 705 bp, Artificial Sequence
  IgG1 light chain
atggagaccgacaccctgctgctctgggtgctgctgctctgggtgcccggctccaccggagacatccagatgacccagagccccagctccctgagcgccagcgtgggcgacagggtgaccatcacctgccgagccagtcagggcatcggcagctggctggcctggtatcagcagaagcccggcaaggcccccaagctgttgatctacgccgcgagcagtctgcaaagcggcgtgcccagcaggttcagcggcagcggatctggcaccgactttaccctcactattagcagcctgcagcccgaggacttcgccacctactactgccagcagagctataccttcccctacaccttcggccagggcaccaagttggagatcaagaggaccgtggccgcccccagcgtgttcatcttccctcccagcgacgagcagctgaagtctggcaccgccagcgtggtgtgcctgctgaacaacttctacccccgcgaggccaaggtgcagtggaaggtggacaacgccctgcagagcggcaacagccaggagagcgtgaccgagcaggactccaaggacagcacctacagcctgagcagcaccctgaccctgagcaaggccgactacgagaagcacaaggtgtacgcctgcgaggtgacccaccagggactgtctagccccgtgaccaagagcttcaaccggggcgagtgctaa

SEQ ID NO: 301 - protein, 234 aa, Artificial Sequence
  IgG1 light chain
METDTLLLWVLLLWVPGSTGDIQMTQSPSSLSASVGDRVTITCRASQGIGSWLAWYQQKPGKAPKLLIYAASSLQSGVPSRFSGSGSGTDFTLTISSLQPEDFATYYCQQSYTFPYTFGQGTKLEIKRTVAAPSVFIFPPSDEQLKSGTASVVCLLNNFYPREAKVQWKVDNALQSGNSQESVTEQDSKDSTYSLSSTLTLSKADYEKHKVYACEVTHQGLSSPVTKSFNRGEC

SEQ ID NO: 302 - DNA, 705 bp, Artificial Sequence
  IgG1 light chain
atggagaccgacaccctgctgctctgggtgctgctgctctgggtgcccggctccaccggagacatccagatgacccagagcccaagtagccttagcgccagcgtgggcgacagggtgacgatcacctgtagggcctctcagagcatcaacaactggctggcctggtatcagcagaagcccggcaaggcccccaagttgctgatctacagtgccagcagcctccagagcggcgtgcccagcaggttcagcggcagcggaagcggcaccgacttcactctgaccatcagctctctgcagcccgaggacttcgccacctactactgccaacaaagctacgacacccccatcacatttggccagggcaccaaggtggagatcaagaggaccgtggccgcccccagcgtgttcatcttccctcccagcgacgagcagctgaagtctggcaccgccagcgtggtgtgcctgctgaacaacttctacccccgcgaggccaaggtgcagtggaaggtggacaacgccctgcagagcggcaacagccaggagagcgtgaccgagcaggactccaaggacagcacctacagcctgagcagcaccctgaccctgagcaaggccgactacgagaagcacaaggtgtacgcctgcgaggtgacccaccagggactgtctagccccgtgaccaagagcttcaaccggggcgagtgctaa

SEQ ID NO: 303 - protein, 234 aa, Artificial Sequence
  IgG1 light chain
METDTLLLWVLLLWVPGSTGDIQMTQSPSSLSASVGDRVTITCRASQSINNWLAWYQQKPGKAPKLLIYSASSLQSGVPSRFSGSGSGTDFTLTISSLQPEDFATYYCQQSYDTPITFGQGTKVEIKRTVAAPSVFIFPPSDEQLKSGTASVVCLLNNFYPREAKVQWKVDNALQSGNSQESVTEQDSKDSTYSLSSTLTLSKADYEKHKVYACEVTHQGLSSPVTKSFNRGEC

SEQ ID NO: 304 - DNA, 720 bp, Artificial Sequence
  IgG1 light chain
atggagaccgacaccctgctgctctgggtgctgctgctctgggtgcccggctccaccggagacatcgtgatgacccagagccccctgagcctccccgtgacccctggcgagcccgccagcatcagctgcaggagcagcgagagcctgctgatcaccaacggcttcaactacatcgactggtaccttcagaagcctggtcagtctccccagctgcttatttacctgggctctaaccgagccgcaggcgtgcccgacaggttcagcggcagcgggagcggcaccgacttcaccctgaagatcagccgggtggaggccgaggacgtgggcgtgtactactgtatgcaggccctgcagactcccatcaccttcggacagggcaccaaggtggagatcaagaggaccgtggccgcccccagcgtgttcatcttccctcccagcgacgagcagctgaagtctggcaccgccagcgtggtgtgcctgctgaacaacttctacccccgcgaggccaaggtgcagtggaaggtggacaacgccctgcagagcggcaacagccaggagagcgtgaccgagcaggactccaaggacagcacctacagcctgagcagcaccctgaccctgagcaaggccgactacgagaagcacaaggtgtacgcctgcgaggtgacccaccagggactgtctagccccgtgaccaagagcttcaaccggggcgagtgctaa

SEQ ID NO: 305 - protein, 239 aa, Artificial Sequence
  IgG1 light chain
METDTLLLWVLLLWVPGSTGDIVMTQSPLSLPVTPGEPASISCRSSESLLITNGFNYIDWYLQKPGQSPQLLIYLGSNRAAGVPDRFSGSGSGTDFTLKISRVEAEDVGVYYCMQALQTPITFGQGTKVEIKRTVAAPSVFIFPPSDEQLKSGTASVVCLLNNFYPREAKVQWKVDNALQSGNSQESVTEQDSKDSTYSLSSTLTLSKADYEKHKVYACEVTHQGLSSPVTKSFNRGEC

SEQ ID NO: 306 - DNA, 705 bp, Artificial Sequence
  IgG1 light chain
atggagaccgacaccctgctgctctgggtgctgctgctctgggtgcccggctccaccggagacatccagatgacccagagcccaagcagcctgagcgccagcgtgggcgacagggtgaccatcacctgtagggcaagccaaagcataagttcatggctggcctggtatcaacagaagcccggcaaggcccccaagctgctgatctacgccgccagcaccctgcagagcggcgtgcccagcaggttcagcggcagtggcagcggcaccgacttcaccttgaccatttccagcctgcagcccgaggacttcgccacctactactgccagcagtactacagcactctgtataccttcggccagggcaccaaggtggagatcaagaggaccgtggccgcccccagcgtgttcatcttccctcccagcgacgagcagctgaagtctggcaccgccagcgtggtgtgcctgctgaacaacttctacccccgcgaggccaaggtgcagtggaaggtggacaacgccctgcagagcggcaacagccaggagagcgtgaccgagcaggactccaaggacagcacctacagcctgagcagcaccctgaccctgagcaaggccgactacgagaagcacaaggtgtacgcctgcgaggtgacccaccagggactgtctagccccgtgaccaagagcttcaaccggggcgagtgctaa

SEQ ID NO: 307 - protein, 234 aa, Artificial Sequence
  IgG1 light chain
METDTLLLWVLLLWVPGSTGDIQMTQSPSSLSASVGDRVTITCRASQSISSWLAWYQQKPGKAPKLLIYAASTLQSGVPSRFSGSGSGTDFTLTISSLQPEDFATYYCQQYYSTLYTFGQGTKVEIKRTVAAPSVFIFPPSDEQLKSGTASVVCLLNNFYPREAKVQWKVDNALQSGNSQESVTEQDSKDSTYSLSSTLTLSKADYEKHKVYACEVTHQGLSSPVTKSFNRGEC

SEQ ID NO: 308 - DNA, 705 bp, Artificial Sequence
  IgG1 light chain
atggagaccgacaccctgctgctctgggtgctgctgctctgggtgcccggctccaccggagacatccagatgacccagagcccaagcagcctgagcgccagtgtgggcgacagggttaccatcacgtgccaggccagccaggacatctcaaactacctgaactggtatcagcagaagcccggcaaggcccccaaacttctgatctacggcgccagcagcttgcaaagcggcgtgcccagcaggttcagcggcagtggcagcgggaccgacttcaccctgacgatcagtagcctgcagcccgaggacttcgccacctactactgccaacaggccaacaccttccccttcacctttggcccaggtaccaaggtggacatcaaaaggaccgtggccgcccccagcgtgttcatcttccctcccagcgacgagcagctgaagtctggcaccgccagcgtggtgtgcctgctgaacaacttctacccccgcgaggccaaggtgcagtggaaggtggacaacgccctgcagagcggcaacagccaggagagcgtgaccgagcaggactccaaggacagcacctacagcctgagcagcaccctgaccctgagcaaggccgactacgagaagcacaaggtgtacgcctgcgaggtgacccaccagggactgtctagccccgtgaccaagagcttcaaccggggcgagtgctaa

SEQ ID NO: 309 - protein, 234 aa, Artificial Sequence
  IgG1 light chain
METDTLLLWVLLLWVPGSTGDIQMTQSPSSLSASVGDRVTITCQASQDISNYLNWYQQKPGKAPKLLIYGASSLQSGVPSRFSGSGSGTDFTLTISSLQPEDFATYYCQQANTFPFTFGPGTKVDIKRTVAAPSVFIFPPSDEQLKSGTASVVCLLNNFYPREAKVQWKVDNALQSGNSQESVTEQDSKDSTYSLSSTLTLSKADYEKHKVYACEVTHQGLSSPVTKSFNRGEC

SEQ ID NO: 310 - DNA, 705 bp, Artificial Sequence
  IgG1 light chain
atggagaccgacaccctgctgctctgggtgctgctgctctgggtgcccggctccaccggagacatccagatgacccagagtccaagcagcctgagcgccagcgtgggcgacagggtgaccataacctgccgagcgagtcagggcatcgacagctggctggcctggtatcagcaaaagcccggcaaggcccccaagctgctgatctacgccgccagcaaactgcagggaggcgtgcccagcaggttcagcggctctggcagcggaaccgactttaccctgacaataagcagtctccagcccgaggacttcgccacctactactgccaacagggctacagcacccccatcaccttcggccagggcactaaggtggacatcaagaggaccgtggccgcccccagcgtgttcatcttccctcccagcgacgagcagctgaagtctggcaccgccagcgtggtgtgcctgctgaacaacttctacccccgcgaggccaaggtgcagtggaaggtggacaacgccctgcagagcggcaacagccaggagagcgtgaccgagcaggactccaaggacagcacctacagcctgagcagcaccctgaccctgagcaaggccgactacgagaagcacaaggtgtacgcctgcgaggtgacccaccagggactgtctagccccgtgaccaagagcttcaaccggggcgagtgctaa

SEQ ID NO: 311 - protein, 234 aa, Artificial Sequence
  IgG1 light chain
METDTLLLWVLLLWVPGSTGDIQMTQSPSSLSASVGDRVTITCRASQGIDSWLAWYQQKPGKAPKLLIYAASKLQGGVPSRFSGSGSGTDFTLTISSLQPEDFATYYCQQGYSTPITFGQGTKVDIKRTVAAPSVFIFPPSDEQLKSGTASVVCLLNNFYPREAKVQWKVDNALQSGNSQESVTEQDSKDSTYSLSSTLTLSKADYEKHKVYACEVTHQGLSSPVTKSFNRGEC

SEQ ID NO: 312 - DNA, 705 bp, Artificial Sequence
  IgG1 light chain
atggagaccgacaccctgctgctctgggtgctgctgctctgggtgcccggctccaccggagacatccagatgacccagagccccagcagcctgagcgccagcgtgggggacagggtgaccatcacctgccgagccagccagaggatcaacagctacctgaattggtatcagcagaagcccggcaaggcccccaagctgcttatctacgccgccagcaccctgcagagcggcgtgccctcaaggttcagcggcagcggaagcggcaccgacttcaccctcaccatctctagcctgcagcccgaggacttcgccacctactactgccagcagagttacagcactccacccaccttcggcggaggcactaaggtggagatcaagaggaccgtggccgcccccagcgtgttcatcttccctcccagcgacgagcagctgaagtctggcaccgccagcgtggtgtgcctgctgaacaacttctacccccgcgaggccaaggtgcagtggaaggtggacaacgccctgcagagcggcaacagccaggagagcgtgaccgagcaggactccaaggacagcacctacagcctgagcagcaccctgaccctgagcaaggccgactacgagaagcacaaggtgtacgcctgcgaggtgacccaccagggactgtctagccccgtgaccaagagcttcaaccggggcgagtgctaa

SEQ ID NO: 313 - protein, 234 aa, Artificial Sequence
  IgG1 light chain
METDTLLLWVLLLWVPGSTGDIQMTQSPSSLSASVGDRVTITCRASQRINSYLNWYQQKPGKAPKLLIYAASTLQSGVPSRFSGSGSGTDFTLTISSLQPEDFATYYCQQSYSTPPTFGGGTKVEIKRTVAAPSVFIFPPSDEQLKSGTASVVCLLNNFYPREAKVQWKVDNALQSGNSQESVTEQDSKDSTYSLSSTLTLSKADYEKHKVYACEVTHQGLSSPVTKSFNRGEC

SEQ ID NO: 314 - DNA, 708 bp, Artificial Sequence
  IgG1 light chain
atggagaccgacaccctgctgctctgggtgctgctgctctgggtgcccggctccaccggagagatcgtgatgacccagagtcccgccacactgagcgtgagccccggagagagggcgaccctgagctgcagggccagccagagcatcagcagcagctacctggcctggtatcaacagaagcccggtcaagcccccaggctgctcatctacggcgccagcactcgggccaccggcatcccagcaaggttctctggcagcggctccggcaccgagttcaccctgaccatcagctctctgcaaagcgaggacttcgccgtgtactactgccagcagtactacaccaccccctggacgtttggccagggaaccaaggtggagatcaagaggaccgtggccgcccccagcgtgttcatcttccctcccagcgacgagcagctgaagtctggcaccgccagcgtggtgtgcctgctgaacaacttctacccccgcgaggccaaggtgcagtggaaggtggacaacgccctgcagagcggcaacagccaggagagcgtgaccgagcaggactccaaggacagcacctacagcctgagcagcaccctgaccctgagcaaggccgactacgagaagcacaaggtgtacgcctgcgaggtgacccaccagggactgtctagccccgtgaccaagagcttcaaccggggcgagtgctaa

SEQ ID NO: 315 - protein, 235 aa, Artificial Sequence
  IgG1 light chain
METDTLLLWVLLLWVPGSTGEIVMTQSPATLSVSPGERATLSCRASQSISSSYLAWYQQKPGQAPRLLIYGASTRATGIPARFSGSGSGTEFTLTISSLQSEDFAVYYCQQYYTTPWTFGQGTKVEIKRTVAAPSVFIFPPSDEQLKSGTASVVCLLNNFYPREAKVQWKVDNALQSGNSQESVTEQDSKDSTYSLSSTLTLSKADYEKHKVYACEVTHQGLSSPVTKSFNRGEC

SEQ ID NO: 316 - DNA, 720 bp, Artificial Sequence
  IgG1 light chain
atggagaccgacaccctgctgctctgggtgctgctgctctgggtgcccggctccaccggagacatcgtgatgacccagagccccctgtccctgcccgtgacccccggagagcccgccagcatcagctgcaggagcagccaaagcctgctgcacagcaacggctacaactaccttgactggtatctgcaaaaaccgggccagagtccccagctgctgatctacctggcaagtaacagggccagcggcgtgcccgacaggttcagcggcagcggaagcggcacagacttcaccctgaagataagccgcgtggaggccgaggacgtgggcgtgtactactgtatgcagggcctgcagacgccccataccttcgggggtggtactaaggtggagatcaagaggaccgtggccgcccccagcgtgttcatcttccctcccagcgacgagcagctgaagtctggcaccgccagcgtggtgtgcctgctgaacaacttctacccccgcgaggccaaggtgcagtggaaggtggacaacgccctgcagagcggcaacagccaggagagcgtgaccgagcaggactccaaggacagcacctacagcctgagcagcaccctgaccctgagcaaggccgactacgagaagcacaaggtgtacgcctgcgaggtgacccaccagggactgtctagccccgtgaccaagagcttcaaccggggcgagtgctaa

SEQ ID NO: 317 - protein, 239 aa, Artificial Sequence
  IgG1 light chain
METDTLLLWVLLLWVPGSTGDIVMTQSPLSLPVTPGEPASISCRSSQSLLHSNGYNYLDWYLQKPGQSPQLLIYLASNRASGVPDRFSGSGSGTDFTLKISRVEAEDVGVYYCMQGLQTPHTFGGGTKVEIKRTVAAPSVFIFPPSDEQLKSGTASVVCLLNNFYPREAKVQWKVDNALQSGNSQESVTEQDSKDSTYSLSSTLTLSKADYEKHKVYACEVTHQGLSSPVTKSFNRGEC

SEQ ID NO: 318 - DNA, 705 bp, Artificial Sequence
  IgG1 light chain
atggagaccgacaccctgctgctctgggtgctgctgctctgggtgcccggctccaccggagacatccagatgacccagagccccagctccctgagcgccagtgtgggcgacagggtaaccatcacctgccgagccagtcagagcgtgggcacctggctggcctggtatcaacagaaacccggcaaggcccccaagctgctgatctacgccgccagcaccctgcagagcggcgtgcccagcaggttcagcggtagcggcagcggcaccgacttcaccctgaccattagcagcctgcagcccgaggacttcgccacctactactgccagcagagctacagcagcccactgaccttcggtcccggaaccaaggtggacatcaagaggaccgtggccgcccccagcgtgttcatcttccctcccagcgacgagcagctgaagtctggcaccgccagcgtggtgtgcctgctgaacaacttctacccccgcgaggccaaggtgcagtggaaggtggacaacgccctgcagagcggcaacagccaggagagcgtgaccgagcaggactccaaggacagcacctacagcctgagcagcaccctgaccctgagcaaggccgactacgagaagcacaaggtgtacgcctgcgaggtgacccaccagggactgtctagccccgtgaccaagagcttcaaccggggcgagtgctaa

SEQ ID NO: 319 - protein, 234 aa, Artificial Sequence
  IgG1 light chain
METDTLLLWVLLLWVPGSTGDIQMTQSPSSLSASVGDRVTITCRASQSVGTWLAWYQQKPGKAPKLLIYAASTLQSGVPSRFSGSGSGTDFTLTISSLQPEDFATYYCQQSYSSPLTFGPGTKVDIKRTVAAPSVFIFPPSDEQLKSGTASVVCLLNNFYPREAKVQWKVDNALQSGNSQESVTEQDSKDSTYSLSSTLTLSKADYEKHKVYACEVTHQGLSSPVTKSFNRGEC

SEQ ID NO: 320 - DNA, 723 bp, Artificial Sequence
  IgG1 light chain
atggagaccgacaccctgctgctctgggtgctgctgctctgggtgcccggctccaccggagacatcgtgatgacccagagccccgacagcctggctgtgagcctgggcgagagggccaccatcaactgcaagagcagccagagcgtgctgtataggagcaacaacaagaactacctggcctggtatcagcaaaagcccggtcagcccccaaagctgctgatttactgggccagcaccagggagagcggcgtgcccgaccgattcagcggcagcgggagcggcacagacttcaccctgaccattagcagtctgcaggcagaggacgtggccgtgtactactgccagcagtactacagcatccccgtgaccttcggccagggaaccaaggtggagatcaagaggaccgtggccgcccccagcgtgttcatcttccctcccagcgacgagcagctgaagtctggcaccgccagcgtggtgtgcctgctgaacaacttctacccccgcgaggccaaggtgcagtggaaggtggacaacgccctgcagagcggcaacagccaggagagcgtgaccgagcaggactccaaggacagcacctacagcctgagcagcaccctgaccctgagcaaggccgactacgagaagcacaaggtgtacgcctgcgaggtgacccaccagggactgtctagccccgtgaccaagagcttcaaccggggcgagtgctaa

SEQ ID NO: 321 - protein, 240 aa, Artificial Sequence
  IgG1 light chain
METDTLLLWVLLLWVPGSTGDIVMTQSPDSLAVSLGERATINCKSSQSVLYRSNNKNYLAWYQQKPGQPPKLLIYWASTRESGVPDRFSGSGSGTDFTLTISSLQAEDVAVYYCQQYYSIPVTFGQGTKVEIKRTVAAPSVFIFPPSDEQLKSGTASVVCLLNNFYPREAKVQWKVDNALQSGNSQESVTEQDSKDSTYSLSSTLTLSKADYEKHKVYACEVTHQGLSSPVTKSFNRGEC

SEQ ID NO: 322 - DNA, 705 bp, Artificial Sequence
  IgG1 light chain
atggagaccgacaccctgctgctctgggtgctgctgctctgggtgcccggctccaccggagacatccagatgacccagagtcccagcagcctgtccgccagcgtgggcgaccgcgtgaccatcacctgccgagccagtcagggcgtggccaactggctggcctggtatcagcagaagcccggcaaggcccccaaacttctgatatacagcgctagcaacctgcagagcggcgtgcccagtaggttcagcggcagcggctctgggacagatttcacccttaccatcagctcattgcagcccgaggacttcgccacctactactgccagcaaagcagcagcttccccctgacattcggccagagcaccaggctggagatcaagaggaccgtggccgcccccagcgtgttcatcttccctcccagcgacgagcagctgaagtctggcaccgccagcgtggtgtgcctgctgaacaacttctacccccgcgaggccaaggtgcagtggaaggtggacaacgccctgcagagcggcaacagccaggagagcgtgaccgagcaggactccaaggacagcacctacagcctgagcagcaccctgaccctgagcaaggccgactacgagaagcacaaggtgtacgcctgcgaggtgacccaccagggactgtctagccccgtgaccaagagcttcaaccggggcgagtgctaa

SEQ ID NO: 323 - protein, 234 aa, Artificial Sequence
  IgG1 light chain
METDTLLLWVLLLWVPGSTGDIQMTQSPSSLSASVGDRVTITCRASQGVANWLAWYQQKPGKAPKLLIYSASNLQSGVPSRFSGSGSGTDFTLTISSLQPEDFATYYCQQSSSFPLTFGQSTRLEIKRTVAAPSVFIFPPSDEQLKSGTASVVCLLNNFYPREAKVQWKVDNALQSGNSQESVTEQDSKDSTYSLSSTLTLSKADYEKHKVYACEVTHQGLSSPVTKSFNRGEC

SEQ ID NO: 324 - DNA, 705 bp, Artificial Sequence
  IgG1 light chain
atggagaccgacaccctgctgctctgggtgctgctgctctgggtgcccggctccaccggagacatccagatgacccagagccctagcagccttagcgccagcgtgggcgacagggtgacgatcacgtgcagggccagccagagcgtgaacaggaggctggcgtggtatcagcagaagcccggcaaggcccccaagctcctgatctacgccgccagcaccctgcagagcggcgtgcccagcaggttcagcggcagcggaagcgggaccgactttaccctgaccatctctagcctgcagcccgaggacttcgccacctactactgccagcaagggaacagcttccctatcacctttggccagggcaccaaggtggagatcaagaggaccgtggccgcccccagcgtgttcatcttccctcccagcgacgagcagctgaagtctggcaccgccagcgtggtgtgcctgctgaacaacttctacccccgcgaggccaaggtgcagtggaaggtggacaacgccctgcagagcggcaacagccaggagagcgtgaccgagcaggactccaaggacagcacctacagcctgagcagcaccctgaccctgagcaaggccgactacgagaagcacaaggtgtacgcctgcgaggtgacccaccagggactgtctagccccgtgaccaagagcttcaaccggggcgagtgctaa

SEQ ID NO: 325 - protein, 234 aa, Artificial Sequence
  IgG1 light chain
METDTLLLWVLLLWVPGSTGDIQMTQSPSSLSASVGDRVTITCRASQSVNRRLAWYQQKPGKAPKLLIYAASTLQSGVPSRFSGSGSGTDFTLTISSLQPEDFATYYCQQGNSFPITFGQGTKVEIKRTVAAPSVFIFPPSDEQLKSGTASVVCLLNNFYPREAKVQWKVDNALQSGNSQESVTEQDSKDSTYSLSSTLTLSKADYEKHKVYACEVTHQGLSSPVTKSFNRGEC

SEQ ID NO: 326 - DNA, 705 bp, Artificial Sequence
  IgG1 light chain
atggagaccgacaccctgctgctctgggtgctgctgctctgggtgcccggctccaccggagacatccagatgacccagagcccctctagcctcagcgccagcgtgggcgaccgcgtgaccataacttgccgagccagccagggcatcagcaacaacctgaattggtatcagcagaagcccggcaaggcccccaagctcctgatctacgccgccagcagccttcagaccggcgtgccgagtaggttcagtggcagcggaagcggcaccgacttcaccctgaccatcagctccctgcagcccgaggacttcgccacctactactgccaacagagctacagcacaccacccactttcggccagggaacgaaggtggagatcaagaggaccgtggccgcccccagcgtgttcatcttccctcccagcgacgagcagctgaagtctggcaccgccagcgtggtgtgcctgctgaacaacttctacccccgcgaggccaaggtgcagtggaaggtggacaacgccctgcagagcggcaacagccaggagagcgtgaccgagcaggactccaaggacagcacctacagcctgagcagcaccctgaccctgagcaaggccgactacgagaagcacaaggtgtacgcctgcgaggtgacccaccagggactgtctagccccgtgaccaagagcttcaaccggggcgagtgctaa

SEQ ID NO: 327 - protein, 234 aa, Artificial Sequence
  IgG1 light chain
METDTLLLWVLLLWVPGSTGDIQMTQSPSSLSASVGDRVTITCRASQGISNNLNWYQQKPGKAPKLLIYAASSLQTGVPSRFSGSGSGTDFTLTISSLQPEDFATYYCQQSYSTPPTFGQGTKVEIKRTVAAPSVFIFPPSDEQLKSGTASVVCLLNNFYPREAKVQWKVDNALQSGNSQESVTEQDSKDSTYSLSSTLTLSKADYEKHKVYACEVTHQGLSSPVTKSFNRGEC

SEQ ID NO: 328 - DNA, 705 bp, Artificial Sequence; identical to SEQ ID NO: 274
  IgG1 light chain

SEQ ID NO: 329 - protein, 234 aa, Artificial Sequence; identical to SEQ ID NO: 275
  IgG1 light chain

SEQ ID NO: 330 - DNA, 705 bp, Artificial Sequence
  IgG1 light chain
atggagaccgacaccctgctgctctgggtgctgctgctctgggtgcccggctccaccggagacatccagatgacccagagccccagcagcctgagcgcctccgtgggcgaccgcgtgaccataacctgccaggccagccagtacatcagcaactacctgaactggtatcagcagaagcccggcaaggcccccaagctgcttatctacggcgccagcaccctgcagagcggcgtgcctagcaggttcagcggcagcggaagcggcaccgacttcaccctgaccatctccagcctgcagcccgaggacttcgccacctactactgccagcagagccagagcactcccctgacgttcggaccgggaaccaaggtggacatcaagaggaccgtggccgcccccagcgtgttcatcttccctcccagcgacgagcagctgaagtctggcaccgccagcgtggtgtgcctgctgaacaacttctacccccgcgaggccaaggtgcagtggaaggtggacaacgccctgcagagcggcaacagccaggagagcgtgaccgagcaggactccaaggacagcacctacagcctgagcagcaccctgaccctgagcaaggccgactacgagaagcacaaggtgtacgcctgcgaggtgacccaccagggactgtctagccccgtgaccaagagcttcaaccggggcgagtgctaa

SEQ ID NO: 331 - protein, 234 aa, Artificial Sequence
  IgG1 light chain
METDTLLLWVLLLWVPGSTGDIQMTQSPSSLSASVGDRVTITCQASQYISNYLNWYQQKPGKAPKLLIYGASTLQSGVPSRFSGSGSGTDFTLTISSLQPEDFATYYCQQSQSTPLTFGPGTKVDIKRTVAAPSVFIFPPSDEQLKSGTASVVCLLNNFYPREAKVQWKVDNALQSGNSQESVTEQDSKDSTYSLSSTLTLSKADYEKHKVYACEVTHQGLSSPVTKSFNRGEC

SEQ ID NO: 332 - DNA, 705 bp, Artificial Sequence; identical to SEQ ID NO: 274
  IgG1 light chain

SEQ ID NO: 333 - protein, 234 aa, Artificial Sequence; identical to SEQ ID NO: 275
  IgG1 light chain

SEQ ID NO: 334 - DNA, 705 bp, Artificial Sequence
  IgG1 light chain
atggagaccgacaccctgctgctctgggtgctgctgctctgggtgcccggctccaccggagacatccagatgacccagagccccagcagtctgagcgccagcgtgggcgacagggtaaccatcacctgtagggcctcacagaacatcggcagctggctggcctggtatcaacagaagcccggcaaggcccccaagctcctgatctaccgagcctccaccctgcagagcggcgtgcccagccggttcagcggcagtggcagcggcaccgatttcaccctgaccatcagcagcttgcagcctgaggacttcgccacctactactgccaacagagctacagcactccatacaccttcggccagggcaccaaggtggagatcaagaggaccgtggccgcccccagcgtgttcatcttccctcccagcgacgagcagctgaagtctggcaccgccagcgtggtgtgcctgctgaacaacttctacccccgcgaggccaaggtgcagtggaaggtggacaacgccctgcagagcggcaacagccaggagagcgtgaccgagcaggactccaaggacagcacctacagcctgagcagcaccctgaccctgagcaaggccgactacgagaagcacaaggtgtacgcctgcgaggtgacccaccagggactgtctagccccgtgaccaagagcttcaaccggggcgagtgctaa

SEQ ID NO: 335 - protein, 234 aa, Artificial Sequence
  IgG1 light chain
METDTLLLWVLLLWVPGSTGDIQMTQSPSSLSASVGDRVTITCRASQNIGSWLAWYQQKPGKAPKLLIYRASTLQSGVPSRFSGSGSGTDFTLTISSLQPEDFATYYCQQSYSTPYTFGQGTKVEIKRTVAAPSVFIFPPSDEQLKSGTASVVCLLNNFYPREAKVQWKVDNALQSGNSQESVTEQDSKDSTYSLSSTLTLSKADYEKHKVYACEVTHQGLSSPVTKSFNRGEC

SEQ ID NO: 336 - DNA, 705 bp, Artificial Sequence
  IgG1 light chain
atggagaccgacaccctgctgctctgggtgctgctgctctgggtgcccggctccaccggagacatccagatgacccagagccccagcagtctcagcgccagcgtgggcgacagggtgacgatcacctgtagggccagccagaccatcagcagctacctgcactggtatcaacaaaagcccggcaaggcccccaagctgttgatctacgccgccagcagccttcagagcggcgtgccaagcaggttcagcggcagtggcagcggcaccgacttcacactgaccatctcaagcctgcagcccgaggacttcgccacctactactgccagcaaagctacagcacacccctcagcttcggcggtggtacgaaactggaaatcaagaggaccgtggccgcccccagcgtgttcatcttccctcccagcgacgagcagctgaagtctggcaccgccagcgtggtgtgcctgctgaacaacttctacccccgcgaggccaaggtgcagtggaaggtggacaacgccctgcagagcggcaacagccaggagagcgtgaccgagcaggactccaaggacagcacctacagcctgagcagcaccctgaccctgagcaaggccgactacgagaagcacaaggtgtacgcctgcgaggtgacccaccagggactgtctagccccgtgaccaagagcttcaaccggggcgagtgctaa

SEQ ID NO: 337 - protein, 234 aa, Artificial Sequence
  IgG1 light chain
METDTLLLWVLLLWVPGSTGDIQMTQSPSSLSASVGDRVTITCRASQTISSYLHWYQQKPGKAPKLLIYAASSLQSGVPSRFSGSGSGTDFTLTISSLQPEDFATYYCQQSYSTPLSFGGGTKLEIKRTVAAPSVFIFPPSDEQLKSGTASVVCLLNNFYPREAKVQWKVDNALQSGNSQESVTEQDSKDSTYSLSSTLTLSKADYEKHKVYACEVTHQGLSSPVTKSFNRGEC

SEQ ID NO: 338 - DNA, 705 bp, Artificial Sequence
  IgG1 light chain
atggagaccgacaccctgctgctctgggtgctgctgctctgggtgcccggctccaccggagacatccagatgacccagagccccagctccctgagcgccagcgtgggcgacagggtgaccatcacgtgcagggccagccagagcattagcagctacctgaattggtatcagcagaagcccggcaaggcccccaaactgctcatctacgccgccagtagcctgcagagcggcgtgcccagcaggttcagcggcagcggctcaggcaccgactttaccctgacaatctcttcccttcagcccgaggacttcgccacctactactgccagcaaagctacagcacccccttcaccttcggccctggaaccaaggtggacatcaagaggaccgtggccgcccccagcgtgttcatcttccctcccagcgacgagcagctgaagtctggcaccgccagcgtggtgtgcctgctgaacaacttctacccccgcgaggccaaggtgcagtggaaggtggacaacgccctgcagagcggcaacagccaggagagcgtgaccgagcaggactccaaggacagcacctacagcctgagcagcaccctgaccctgagcaaggccgactacgagaagcacaaggtgtacgcctgcgaggtgacccaccagggactgtctagccccgtgaccaagagcttcaaccggggcgagtgctaa

SEQ ID NO: 339 - protein, 234 aa, Artificial Sequence
  IgG1 light chain
METDTLLLWVLLLWVPGSTGDIQMTQSPSSLSASVGDRVTITCRASQSISSYLNWYQQKPGKAPKLLIYAASSLQSGVPSRFSGSGSGTDFTLTISSLQPEDFATYYCQQSYSTPFTFGPGTKVDIKRTVAAPSVFIFPPSDEQLKSGTASVVCLLNNFYPREAKVQWKVDNALQSGNSQESVTEQDSKDSTYSLSSTLTLSKADYEKHKVYACEVTHQGLSSPVTKSFNRGEC

SEQ ID NO: 340 - DNA, 708 bp, Artificial Sequence
  IgG1 light chain
atggagaccgacaccctgctgctctgggtgctgctgctctgggtgcccggctccaccggagagatcgtgatgacccagagccccgctaccctgagcgtgagtcccggcgagagggccacccttagctgcagggcaagccagaccatcagctcaagctacctggcctggtatcagcagaagcccggtcaagcccccaggttgctgatctacggcgccagcaccagggcgaccggcatccccgccaggttcagcggcagcggaagcggcaccgagttcaccctgactatctccagcctgcagagcgaggacttcgccgtgtactactgccagcagtacggctcaagtcccctgaccttcgggggaggaactaaggtggagatcaagaggaccgtggccgcccccagcgtgttcatcttccctcccagcgacgagcagctgaagtctggcaccgccagcgtggtgtgcctgctgaacaacttctacccccgcgaggccaaggtgcagtggaaggtggacaacgccctgcagagcggcaacagccaggagagcgtgaccgagcaggactccaaggacagcacctacagcctgagcagcaccctgaccctgagcaaggccgactacgagaagcacaaggtgtacgcctgcgaggtgacccaccagggactgtctagccccgtgaccaagagcttcaaccggggcgagtgctaa

SEQ ID NO: 341 - protein, 235 aa, Artificial Sequence
  IgG1 light chain
METDTLLLWVLLLWVPGSTGEIVMTQSPATLSVSPGERATLSCRASQTISSSYLAWYQQKPGQAPRLLIYGASTRATGIPARFSGSGSGTEFTLTISSLQSEDFAVYYCQQYGSSPLTFGGGTKVEIKRTVAAPSVFIFPPSDEQLKSGTASVVCLLNNFYPREAKVQWKVDNALQSGNSQESVTEQDSKDSTYSLSSTLTLSKADYEKHKVYACEVTHQGLSSPVTKSFNRGEC

SEQ ID NO: 342 - DNA, 717 bp, Artificial Sequence
  IgG1 light chain
atggagaccgacaccctgctgctctgggtgctgctgctctgggtgcccggctccaccggagacatcgtgatgacccagagccctctgagtctgcccgtgacccccggtgagcccgcaagcatcagctgcaggagctcacagagcctgctgcacagcaacggctacaactacctggactggtacctgcagaagcccggtcaaagcccccagctgctgatatacgccgccagcagtctccagggtggtgtgcccgacaggttcagcggaagcggcagcggcaccgacttcaccctgaagataagcagggttgaggccgaggacgtgggcgtgtactactgtatgcaggggacccactggccgaccttcggccaaggcacaaaggtggaaatcaagaggaccgtggccgcccccagcgtgttcatcttccctcccagcgacgagcagctgaagtctggcaccgccagcgtggtgtgcctgctgaacaacttctacccccgcgaggccaaggtgcagtggaaggtggacaacgccctgcagagcggcaacagccaggagagcgtgaccgagcaggactccaaggacagcacctacagcctgagcagcaccctgaccctgagcaaggccgactacgagaagcacaaggtgtacgcctgcgaggtgacccaccagggactgtctagccccgtgaccaagagcttcaaccggggcgagtgctaa

SEQ ID NO: 343 - protein, 238 aa, Artificial Sequence
  IgG1 light chain
METDTLLLWVLLLWVPGSTGDIVMTQSPLSLPVTPGEPASISCRSSQSLLHSNGYNYLDWYLQKPGQSPQLLIYAASSLQGGVPDRFSGSGSGTDFTLKISRVEAEDVGVYYCMQGTHWPTFGQGTKVEIKRTVAAPSVFIFPPSDEQLKSGTASVVCLLNNFYPREAKVQWKVDNALQSGNSQESVTEQDSKDSTYSLSSTLTLSKADYEKHKVYACEVTHQGLSSPVTKSFNRGEC

SEQ ID NO: 344 - DNA, 705 bp, Artificial Sequence; identical to SEQ ID NO: 274
  IgG1 light chain

SEQ ID NO: 345 - protein, 234 aa, Artificial Sequence; identical to SEQ ID NO: 275
  IgG1 light chain

SEQ ID NO: 346 - DNA, 717 bp, Artificial Sequence
  IgG1 light chain
atggagaccgacaccctgctgctctgggtgctgctgctctgggtgcccggctccaccggagacatcgtgatgacccagagtccccttagcttgcccgtgacgccaggcgaacccgccagcatcagctgcaggagcagccagagcctgctgcacagcaacggctacaactacttggattggtacctgcaaaaacccggccaaagcccccagctgctgatctaccttggcagcaacagggccagcggcgtgcccgacaggttcagcggctccggcagcggcaccgacttcaccctgaagattagccgcgtggaggccgaggacgtgggcgtgtactactgtatgcaggccctgcagactcccaccttcggccagggcaccaaggtggagatcaagaggaccgtggccgcccccagcgtgttcatcttccctcccagcgacgagcagctgaagtctggcaccgccagcgtggtgtgcctgctgaacaacttctacccccgcgaggccaaggtgcagtggaaggtggacaacgccctgcagagcggcaacagccaggagagcgtgaccgagcaggactccaaggacagcacctacagcctgagcagcaccctgaccctgagcaaggccgactacgagaagcacaaggtgtacgcctgcgaggtgacccaccagggactgtctagccccgtgaccaagagcttcaaccggggcgagtgctaa

SEQ ID NO: 347 - protein, 238 aa, Artificial Sequence
  IgG1 light chain
METDTLLLWVLLLWVPGSTGDIVMTQSPLSLPVTPGEPASISCRSSQSLLHSNGYNYLDWYLQKPGQSPQLLIYLGSNRASGVPDRFSGSGSGTDFTLKISRVEAEDVGVYYCMQALQTPTFGQGTKVEIKRTVAAPSVFIFPPSDEQLKSGTASVVCLLNNFYPREAKVQWKVDNALQSGNSQESVTEQDSKDSTYSLSSTLTLSKADYEKHKVYACEVTHQGLSSPVTKSFNRGEC

SEQ ID NO: 348 - DNA, 720 bp, Artificial Sequence
  IgG1 light chain
atggagaccgacaccctgctgctctgggtgctgctgctctgggtgcccggctccaccggagacatcgtgatgacccagagcccactgagtctgcccgtgacccccggtgagcccgccagcatcagctgcaggagctcacagagcctgctgcacagcaacggctacaactacctggactggtacttgcagaagcccggtcagtcaccgcagctccttatctacctcggcagcaacagggccagcggcgtgcccgaccgattcagcggaagcggcagcgggaccgacttcaccctgaaaatcagcagggtggaggccgaggacgtgggcgtgtactactgtatgcaagccctgcagaccccgctgacgttcggccagggcaccaaggtggagatcaagaggaccgtggccgcccccagcgtgttcatcttccctcccagcgacgagcagctgaagtctggcaccgccagcgtggtgtgcctgctgaacaacttctacccccgcgaggccaaggtgcagtggaaggtggacaacgccctgcagagcggcaacagccaggagagcgtgaccgagcaggactccaaggacagcacctacagcctgagcagcaccctgaccctgagcaaggccgactacgagaagcacaaggtgtacgcctgcgaggtgacccaccagggactgtctagccccgtgaccaagagcttcaaccggggcgagtgctaa

SEQ ID NO: 349 - protein, 239 aa, Artificial Sequence
  IgG1 light chain
METDTLLLWVLLLWVPGSTGDIVMTQSPLSLPVTPGEPASISCRSSQSLLHSNGYNYLDWYLQKPGQSPQLLIYLGSNRASGVPDRFSGSGSGTDFTLKISRVEAEDVGVYYCMQALQTPLTFGQGTKVEIKRTVAAPSVFIFPPSDEQLKSGTASVVCLLNNFYPREAKVQWKVDNALQSGNSQESVTEQDSKDSTYSLSSTLTLSKADYEKHKVYACEVTHQGLSSPVTKSFNRGEC

SEQ ID NO: 350 - DNA, 705 bp, Artificial Sequence
  IgG1 light chain
atggagaccgacaccctgctgctctgggtgctgctgctctgggtgcccggctccaccggagacatccagatgacccagagccctagcagcctgagcgccagcgtgggggacagggtgaccatcacgtgccgagccagccagggcatcagctcatacctggcctggtatcagcagaagcccggcaaggcccccaagctgcttatctatagggccagcaccctgcagagcggcgtgcccagcaggttcagcggcagcggaagcgggaccgacttcaccttgactatctctagtcttcagcccgaggacttcgccacctactactgccagcaatcttacaacaccccctggaccttcggccagagcaccaaggtggagatcaagaggaccgtggccgcccccagcgtgttcatcttccctcccagcgacgagcagctgaagtctggcaccgccagcgtggtgtgcctgctgaacaacttctacccccgcgaggccaaggtgcagtggaaggtggacaacgccctgcagagcggcaacagccaggagagcgtgaccgagcaggactccaaggacagcacctacagcctgagcagcaccctgaccctgagcaaggccgactacgagaagcacaaggtgtacgcctgcgaggtgacccaccagggactgtctagccccgtgaccaagagcttcaaccggggcgagtgctaa

SEQ ID NO: 351 - protein, 234 aa, Artificial Sequence
  IgG1 light chain
METDTLLLWVLLLWVPGSTGDIQMTQSPSSLSASVGDRVTITCRASQGISSYLAWYQQKPGKAPKLLIYRASTLQSGVPSRFSGSGSGTDFTLTISSLQPEDFATYYCQQSYNTPWTFGQSTKVEIKRTVAAPSVFIFPPSDEQLKSGTASVVCLLNNFYPREAKVQWKVDNALQSGNSQESVTEQDSKDSTYSLSSTLTLSKADYEKHKVYACEVTHQGLSSPVTKSFNRGEC

SEQ ID NO: 352 - DNA, 705 bp, Artificial Sequence
  IgG1 light chain
atggagaccgacaccctgctgctctgggtgctgctgctctgggtgcccggctccaccggagacatccagatgacccagagccccagcagcctgagcgccagcgtgggcgacagggtgacaatcacctgccgagcgagccaaggcgtgacctcatggctggcctggtatcagcagaagcccggcaaggcccccaagttgctgatctacgccgccagcaccctgcagagcggcgtgccgtctaggttcagcggaagcggcagtggcaccgacttcaccctcaccatctccagcctgcagcccgaggacttcgccacctactactgccagcaggcgaacagcttccccctgaccttcggcggtggtactaaggtggagatcaagaggaccgtggccgcccccagcgtgttcatcttccctcccagcgacgagcagctgaagtctggcaccgccagcgtggtgtgcctgctgaacaacttctacccccgcgaggccaaggtgcagtggaaggtggacaacgccctgcagagcggcaacagccaggagagcgtgaccgagcaggactccaaggacagcacctacagcctgagcagcaccctgaccctgagcaaggccgactacgagaagcacaaggtgtacgcctgcgaggtgacccaccagggactgtctagccccgtgaccaagagcttcaaccggggcgagtgctaa

SEQ ID NO: 353 - protein, 234 aa, Artificial Sequence
  IgG1 light chain
METDTLLLWVLLLWVPGSTGDIQMTQSPSSLSASVGDRVTITCRASQGVTSWLAWYQQKPGKAPKLLIYAASTLQSGVPSRFSGSGSGTDFTLTISSLQPEDFATYYCQQANSFPLTFGGGTKVEIKRTVAAPSVFIFPPSDEQLKSGTASVVCLLNNFYPREAKVQWKVDNALQSGNSQESVTEQDSKDSTYSLSSTLTLSKADYEKHKVYACEVTHQGLSSPVTKSFNRGEC

SEQ ID NO: 354 - DNA, 705 bp, Artificial Sequence
  IgG1 light chain
atggagaccgacaccctgctgctctgggtgctgctgctctgggtgcccggctccaccggagacatccagatgacccagagccccagtagcctgagcgccagcgtgggcgacagggtgaccatcacctgccaggccagccaggacatcagcaactacctgaactggtatcaacaaaagcccggcaaggcccccaagctgctgatctacgccgccagctccctgcagagcggcgtgcccagcaggttcagtggcagcggctcaggaaccgactttaccctgaccattagcagcctccagcccgaggacttcgccacctactactgccaacagagcttctctagcacccccaccttcggccagggcaccaagttggagatcaagaggaccgtggccgcccccagcgtgttcatcttccctcccagcgacgagcagctgaagtctggcaccgccagcgtggtgtgcctgctgaacaacttctacccccgcgaggccaaggtgcagtggaaggtggacaacgccctgcagagcggcaacagccaggagagcgtgaccgagcaggactccaaggacagcacctacagcctgagcagcaccctgaccctgagcaaggccgactacgagaagcacaaggtgtacgcctgcgaggtgacccaccagggactgtctagccccgtgaccaagagcttcaaccggggcgagtgctaa

SEQ ID NO: 355 - protein, 234 aa, Artificial Sequence
  IgG1 light chain
METDTLLLWVLLLWVPGSTGDIQMTQSPSSLSASVGDRVTITCQASQDISNYLNWYQQKPGKAPKLLIYAASSLQSGVPSRFSGSGSGTDFTLTISSLQPEDFATYYCQQSFSSTPTFGQGTKLEIKRTVAAPSVFIFPPSDEQLKSGTASVVCLLNNFYPREAKVQWKVDNALQSGNSQESVTEQDSKDSTYSLSSTLTLSKADYEKHKVYACEVTHQGLSSPVTKSFNRGEC

SEQ ID NO: 356 - DNA, 705 bp, Artificial Sequence
  IgG1 light chain
atggagaccgacaccctgctgctctgggtgctgctgctctgggtgcccggctccaccggagacatccagatgacccagagccctagcagcttgagcgccagcgtgggcgatagggtgaccatcacctgtagggccagccagagcatcagtagctatctgaactggtatcagcagaagcccggcaaggcccccaaacttttgatatacgccgcaagcaccctgcagaggggcgtgcccagcaggttcagcgggagcggcagcggcaccgacttcaccctgaccataagcagcctgcagcccgaggacttcgccacctactactgccagcagtcctacagcacccctcttaccttcggcggagggactaaggtggagatcaagaggaccgtggccgcccccagcgtgttcatcttccctcccagcgacgagcagctgaagtctggcaccgccagcgtggtgtgcctgctgaacaacttctacccccgcgaggccaaggtgcagtggaaggtggacaacgccctgcagagcggcaacagccaggagagcgtgaccgagcaggactccaaggacagcacctacagcctgagcagcaccctgaccctgagcaaggccgactacgagaagcacaaggtgtacgcctgcgaggtgacccaccagggactgtctagccccgtgaccaagagcttcaaccggggcgagtgctaa

SEQ ID NO: 357 - protein, 234 aa, Artificial Sequence
  IgG1 light chain
METDTLLLWVLLLWVPGSTGDIQMTQSPSSLSASVGDRVTITCRASQSISSYLNWYQQKPGKAPKLLIYAASTLQRGVPSRFSGSGSGTDFTLTISSLQPEDFATYYCQQSYSTPLTFGGGTKVEIKRTVAAPSVFIFPPSDEQLKSGTASVVCLLNNFYPREAKVQWKVDNALQSGNSQESVTEQDSKDSTYSLSSTLTLSKADYEKHKVYACEVTHQGLSSPVTKSFNRGEC

SEQ ID NO: 358 - DNA, 705 bp, Artificial Sequence
  IgG1 light chain
atggagaccgacaccctgctgctctgggtgctgctgctctgggtgcccggctccaccggagacatccagatgacccagagccccagcagcctgagcgccagcgtgggcgacagggtgaccatcacgtgcagggccagccaggacctgagcaaccacctggcctggtatcagcagaagcccggcaaggcccccaagctgctcatctacgccgccagcaccctgcagagcggcgtgcctagcaggttcagcggcagcggaagcggcaccgactttaccctgaccatttctagcctgcagcccgaggacttcgccacctactactgccagcagtaccacgactggcccctgactttcggccagggcaccaaggtggagatcaagaggaccgtggccgcccccagcgtgttcatcttccctcccagcgacgagcagctgaagtctggcaccgccagcgtggtgtgcctgctgaacaacttctacccccgcgaggccaaggtgcagtggaaggtggacaacgccctgcagagcggcaacagccaggagagcgtgaccgagcaggactccaaggacagcacctacagcctgagcagcaccctgaccctgagcaaggccgactacgagaagcacaaggtgtacgcctgcgaggtgacccaccagggactgtctagccccgtgaccaagagcttcaaccggggcgagtgctaa

SEQ ID NO: 359 - protein, 234 aa, Artificial Sequence
  IgG1 light chain
METDTLLLWVLLLWVPGSTGDIQMTQSPSSLSASVGDRVTITCRASQDLSNHLAWYQQKPGKAPKLLIYAASTLQSGVPSRFSGSGSGTDFTLTISSLQPEDFATYYCQQYHDWPLTFGQGTKVEIKRTVAAPSVFIFPPSDEQLKSGTASVVCLLNNFYPREAKVQWKVDNALQSGNSQESVTEQDSKDSTYSLSSTLTLSKADYEKHKVYACEVTHQGLSSPVTKSFNRGEC

SEQ ID NO: 360 - DNA, 720 bp, Artificial Sequence
  IgG1 light chain
atggagaccgacaccctgctgctctgggtgctgctgctctgggtgcccggctccaccggagacatcgtgatgacccagagccccctgagcctgcccgtgacccccggtgagcccgccagcatcagctgcaggagcagccaaagcctgctgcacagcaacggctacaactacctggactggtacttgcaaaagccaggccagtctccccagctgctgatctacgccgcctctagcctgcagagcggcgtgcccgacaggttcagcggcagtggcagcggcaccgacttcaccctgaagattagcagggtggaggccgaggacgtgggcgtgtactattgtatgcagtccctgcaaacgccacccaccttcggacagggcaccaagctggagatcaagaggaccgtggccgcccccagcgtgttcatcttccctcccagcgacgagcagctgaagtctggcaccgccagcgtggtgtgcctgctgaacaacttctacccccgcgaggccaaggtgcagtggaaggtggacaacgccctgcagagcggcaacagccaggagagcgtgaccgagcaggactccaaggacagcacctacagcctgagcagcaccctgaccctgagcaaggccgactacgagaagcacaaggtgtacgcctgcgaggtgacccaccagggactgtctagccccgtgaccaagagcttcaaccggggcgagtgctaa

SEQ ID NO: 361 - protein, 239 aa, Artificial Sequence
  IgG1 light chain
METDTLLLWVLLLWVPGSTGDIVMTQSPLSLPVTPGEPASISCRSSQSLLHSNGYNYLDWYLQKPGQSPQLLIYAASSLQSGVPDRFSGSGSGTDFTLKISRVEAEDVGVYYCMQSLQTPPTFGQGTKLEIKRTVAAPSVFIFPPSDEQLKSGTASVVCLLNNFYPREAKVQWKVDNALQSGNSQESVTEQDSKDSTYSLSSTLTLSKADYEKHKVYACEVTHQGLSSPVTKSFNRGEC

SEQ ID NO: 362 - DNA, 723 bp, Artificial Sequence
  IgG1 light chain
atggagaccgacaccctgctgctctgggtgctgctgctctgggtgcccggctccaccggagacatcgtgatgacccagagccccgacagcctggccgtgagcctgggcgagagggccaccatcaactgcaagagctcacagagcataagccacagccccaacacccgagactacctggcgtggtatcagcagaagccaggccagccccctaaactgttgatctactgggccagcaccagggagagcggcgtgcccgataggtttagcggatctggaagtggcaccgacttcaccctgaccatctcctctctgcaagccgaagacgtggccgtctactactgccagcagtactacaggttccccctggcctttggccagagcactaaggtggagatcaagaggaccgtggccgcccccagcgtgttcatcttccctcccagcgacgagcagctgaagtctggcaccgccagcgtggtgtgcctgctgaacaacttctacccccgcgaggccaaggtgcagtggaaggtggacaacgccctgcagagcggcaacagccaggagagcgtgaccgagcaggactccaaggacagcacctacagcctgagcagcaccctgaccctgagcaaggccgactacgagaagcacaaggtgtacgcctgcgaggtgacccaccagggactgtctagccccgtgaccaagagcttcaaccggggcgagtgctaa

SEQ ID NO: 363 - protein, 240 aa, Artificial Sequence
  IgG1 light chain
METDTLLLWVLLLWVPGSTGDIVMTQSPDSLAVSLGERATINCKSSQSISHSPNTRDYLAWYQQKPGQPPKLLIYWASTRESGVPDRFSGSGSGTDFTLTISSLQAEDVAVYYCQQYYRFPLAFGQSTKVEIKRTVAAPSVFIFPPSDEQLKSGTASVVCLLNNFYPREAKVQWKVDNALQSGNSQESVTEQDSKDSTYSLSSTLTLSKADYEKHKVYACEVTHQGLSSPVTKSFNRGEC

SEQ ID NO: 364 - DNA, 720 bp, Artificial Sequence
  IgG1 light chain
atggagaccgacaccctgctgctctgggtgctgctgctctgggtgcccggctccaccggagacatcgtgatgacccagagccccctgagcctgcccgtcacccccggagagcccgccagcatcagctgcaggagctcacagagcctgttgttgaataacggcaacaacttcatcgactggtacttgcagaagcctggccaaagcccccagctgctgatttacgccgcctccatccttcaaggaggcgttcccgacaggttcagcggcagcggaagcgggaccgacttcaccctgaagatcagtagggtggaggccgaggacgtgggcgtgtactattgtatgcaggccctgcagactcctcccactttcggccagggcaccaaggtggagatcaagaggaccgtggccgcccccagcgtgttcatcttccctcccagcgacgagcagctgaagtctggcaccgccagcgtggtgtgcctgctgaacaacttctacccccgcgaggccaaggtgcagtggaaggtggacaacgccctgcagagcggcaacagccaggagagcgtgaccgagcaggactccaaggacagcacctacagcctgagcagcaccctgaccctgagcaaggccgactacgagaagcacaaggtgtacgcctgcgaggtgacccaccagggactgtctagccccgtgaccaagagcttcaaccggggcgagtgctaa

SEQ ID NO: 365 - protein, 239 aa, Artificial Sequence
  IgG1 light chain
METDTLLLWVLLLWVPGSTGDIVMTQSPLSLPVTPGEPASISCRSSQSLLLNNGNNFIDWYLQKPGQSPQLLIYAASILQGGVPDRFSGSGSGTDFTLKISRVEAEDVGVYYCMQALQTPPTFGQGTKVEIKRTVAAPSVFIFPPSDEQLKSGTASVVCLLNNFYPREAKVQWKVDNALQSGNSQESVTEQDSKDSTYSLSSTLTLSKADYEKHKVYACEVTHQGLSSPVTKSFNRGEC

SEQ ID NO: 366 - DNA, 702 bp, Artificial Sequence
  IgG1 light chain
atggagaccgacaccctgctgctctgggtgctgctgctctgggtgcccggctccaccggagagatcgtgatgacccagagccccgctaccctgagcgttagtccgggcgagagggcaacactgagctgcagggcaagccagagcgtgagcagctacctggcctggtatcaacagaagccaggacaggcccccaggttgctgatctacggcgccagcaccagggccacgggcatccccgccaggttcagcggcagcggctccggcaccgagttcaccctcaccatcagcagcctgcagagcgaggacttcgccgtgtactactgccagcagtacgacaaccggcccaccttcggccagggaaccaagctggagatcaagaggaccgtggccgcccccagcgtgttcatcttccctcccagcgacgagcagctgaagtctggcaccgccagcgtggtgtgcctgctgaacaacttctacccccgcgaggccaaggtgcagtggaaggtggacaacgccctgcagagcggcaacagccaggagagcgtgaccgagcaggactccaaggacagcacctacagcctgagcagcaccctgaccctgagcaaggccgactacgagaagcacaaggtgtacgcctgcgaggtgacccaccagggactgtctagccccgtgaccaagagcttcaaccggggcgagtgctaa

SEQ ID NO: 367 - protein, 233 aa, Artificial Sequence
  IgG1 light chain
METDTLLLWVLLLWVPGSTGEIVMTQSPATLSVSPGERATLSCRASQSVSSYLAWYQQKPGQAPRLLIYGASTRATGIPARFSGSGSGTEFTLTISSLQSEDFAVYYCQQYDNRPTFGQGTKLEIKRTVAAPSVFIFPPSDEQLKSGTASVVCLLNNFYPREAKVQWKVDNALQSGNSQESVTEQDSKDSTYSLSSTLTLSKADYEKHKVYACEVTHQGLSSPVTKSFNRGEC

SEQ ID NO: 368 - DNA, 705 bp, Artificial Sequence
  IgG1 light chain
atggagaccgacaccctgctgctctgggtgctgctgctctgggtgcccggctccaccggagacatccagatgacccagagccccagctccctgagcgccagcgtgggcgacagggtgaccatcacctgtagggccagccaaggcatcagcaactacctgaactggtatcagcagaagcccggcaaggcccccaaacttttgatttacgccgccagcagtttgcagagcggcgtgcccagcaggttcagcggaagcggcagcggcaccgacttcaccctcaccattagcagcctgcagcccgaggacttcgccacctactactgccagcaaagctacaggacccccatcactttcggccagggcactaggctggagatcaagaggaccgtggccgcccccagcgtgttcatcttccctcccagcgacgagcagctgaagtctggcaccgccagcgtggtgtgcctgctgaacaacttctacccccgcgaggccaaggtgcagtggaaggtggacaacgccctgcagagcggcaacagccaggagagcgtgaccgagcaggactccaaggacagcacctacagcctgagcagcaccctgaccctgagcaaggccgactacgagaagcacaaggtgtacgcctgcgaggtgacccaccagggactgtctagccccgtgaccaagagcttcaaccggggcgagtgctaa

SEQ ID NO: 369 - protein, 234 aa, Artificial Sequence
  IgG1 light chain
METDTLLLWVLLLWVPGSTGDIQMTQSPSSLSASVGDRVTITCRASQGISNYLNWYQQKPGKAPKLLIYAASSLQSGVPSRFSGSGSGTDFTLTISSLQPEDFATYYCQQSYRTPITFGQGTRLEIKRTVAAPSVFIFPPSDEQLKSGTASVVCLLNNFYPREAKVQWKVDNALQSGNSQESVTEQDSKDSTYSLSSTLTLSKADYEKHKVYACEVTHQGLSSPVTKSFNRGEC

SEQ ID NO: 370 - DNA, 720 bp, Artificial Sequence
  IgG1 light chain
atggagaccgacaccctgctgctctgggtgctgctgctctgggtgcccggctccaccggagacatcgtgatgacccaaagcccactgagcttgcccgtgacccctggcgagccggccagcatcagctgcaggagcagccagagcctgctgcacagcaacggctacaactacctggactggtacctgcaaaagccaggccagagtccccagctgctgatatacgccgccagcagcctgcagagtggcgtgcccgaccgatttagcggctccggcagcggcaccgacttcaccctgaagatcagccgcgtggaggccgaggacgtgggcgtgtactactgtatgcaagcccttcaaacccccatcaccttcggacagggcaccaggctggagatcaagaggaccgtggccgcccccagcgtgttcatcttccctcccagcgacgagcagctgaagtctggcaccgccagcgtggtgtgcctgctgaacaacttctacccccgcgaggccaaggtgcagtggaaggtggacaacgccctgcagagcggcaacagccaggagagcgtgaccgagcaggactccaaggacagcacctacagcctgagcagcaccctgaccctgagcaaggccgactacgagaagcacaaggtgtacgcctgcgaggtgacccaccagggactgtctagccccgtgaccaagagcttcaaccggggcgagtgctaa

SEQ ID NO: 371 - protein, 239 aa, Artificial Sequence
  IgG1 light chain
METDTLLLWVLLLWVPGSTGDIVMTQSPLSLPVTPGEPASISCRSSQSLLHSNGYNYLDWYLQKPGQSPQLLIYAASSLQSGVPDRFSGSGSGTDFTLKISRVEAEDVGVYYCMQALQTPITFGQGTRLEIKRTVAAPSVFIFPPSDEQLKSGTASVVCLLNNFYPREAKVQWKVDNALQSGNSQESVTEQDSKDSTYSLSSTLTLSKADYEKHKVYACEVTHQGLSSPVTKSFNRGEC

SEQ ID NO: 372 - DNA, 705 bp, Artificial Sequence
  IgG1 light chain
atggagaccgacaccctgctgctctgggtgctgctgctctgggtgcccggctccaccggagacatccagatgacccagagcccaagtagcctgagcgccagcgtgggcgacagggtgaccatcacgtgccgagcgagccagagcatctcaagctggctggcctggtatcaacagaagcccggcaaggcccccaaactgctgatctacgccgccagcaacctgcagagcggcgtgcccagcaggttcagcggcagcggaagcgggaccgactttacccttaccatcagctcactgcagcccgaggacttcgccacctactactgccagcagagctacagcacccccgtgaccttcggccagtcaactaggctggagatcaagaggaccgtggccgcccccagcgtgttcatcttccctcccagcgacgagcagctgaagtctggcaccgccagcgtggtgtgcctgctgaacaacttctacccccgcgaggccaaggtgcagtggaaggtggacaacgccctgcagagcggcaacagccaggagagcgtgaccgagcaggactccaaggacagcacctacagcctgagcagcaccctgaccctgagcaaggccgactacgagaagcacaaggtgtacgcctgcgaggtgacccaccagggactgtctagccccgtgaccaagagcttcaaccggggcgagtgctaa

SEQ ID NO: 373 - protein, 234 aa, Artificial Sequence
  IgG1 light chain
METDTLLLWVLLLWVPGSTGDIQMTQSPSSLSASVGDRVTITCRASQSISSWLAWYQQKPGKAPKLLIYAASNLQSGVPSRFSGSGSGTDFTLTISSLQPEDFATYYCQQSYSTPVTFGQSTRLEIKRTVAAPSVFIFPPSDEQLKSGTASVVCLLNNFYPREAKVQWKVDNALQSGNSQESVTEQDSKDSTYSLSSTLTLSKADYEKHKVYACEVTHQGLSSPVTKSFNRGEC

SEQ ID NO: 374 - DNA, 720 bp, Artificial Sequence
  IgG1 light chain
atggagaccgacaccctgctgctctgggtgctgctgctctgggtgcccggctccaccggagacatcgtgatgacccagtccccgctgagcctgcccgtgacccctggcgagcccgccagcatcagctgcaggagcagccaaagtttgctgcacagcaacggctacaactatctggactggtacctgcagaagcccggacagagcccccagctgctgatctacctgggcagcaacaggaccagcggcgtgcccgacaggttcagtggtagcggcagcgggaccgacttcaccctgaagatctctagggtggaggccgaggacgtgggcgtgtactactgtatgcaagccacccactggcccctgaccttcggccagggcaccaagctggagatcaagaggaccgtggccgcccccagcgtgttcatcttccctcccagcgacgagcagctgaagtctggcaccgccagcgtggtgtgcctgctgaacaacttctacccccgcgaggccaaggtgcagtggaaggtggacaacgccctgcagagcggcaacagccaggagagcgtgaccgagcaggactccaaggacagcacctacagcctgagcagcaccctgaccctgagcaaggccgactacgagaagcacaaggtgtacgcctgcgaggtgacccaccagggactgtctagccccgtgaccaagagcttcaaccggggcgagtgctaa

SEQ ID NO: 375 - protein, 239 aa, Artificial Sequence
  IgG1 light chain
METDTLLLWVLLLWVPGSTGDIVMTQSPLSLPVTPGEPASISCRSSQSLLHSNGYNYLDWYLQKPGQSPQLLIYLGSNRTSGVPDRFSGSGSGTDFTLKISRVEAEDVGVYYCMQATHWPLTFGQGTKLEIKRTVAAPSVFIFPPSDEQLKSGTASVVCLLNNFYPREAKVQWKVDNALQSGNSQESVTEQDSKDSTYSLSSTLTLSKADYEKHKVYACEVTHQGLSSPVTKSFNRGEC

SEQ ID NO: 376 - DNA, 720 bp, Artificial Sequence
  IgG1 light chain
atggagaccgacaccctgctgctctgggtgctgctgctctgggtgcccggctccaccggagacatcgtgatgacccaaagcccactgagcttgcccgtgacccctggcgagccggccagcatcagctgcaggagcagccagagcctgctgcacagcaacggctacaactacctggactggtacctgcaaaagccaggccagagtccccagctgctgatatacgccgccagcagcctgcagagtggcgtgcccgaccgatttagcggctccggcagcggcaccgacttcaccctgaagatcagccgcgtggaggccgaggacgtgggcgtgtactactgtatgcaagcccttcaaacccccatcaccttcggacagggcaccaaggtggagatcaagaggaccgtggccgcccccagcgtgttcatcttccctcccagcgacgagcagctgaagtctggcaccgccagcgtggtgtgcctgctgaacaacttctacccccgcgaggccaaggtgcagtggaaggtggacaacgccctgcagagcggcaacagccaggagagcgtgaccgagcaggactccaaggacagcacctacagcctgagcagcaccctgaccctgagcaaggccgactacgagaagcacaaggtgtacgcctgcgaggtgacccaccagggactgtctagccccgtgaccaagagcttcaaccggggcgagtgctaa

SEQ ID NO: 377 - protein, 239 aa, Artificial Sequence
  IgG1 light chain
METDTLLLWVLLLWVPGSTGDIVMTQSPLSLPVTPGEPASISCRSSQSLLHSNGYNYLDWYLQKPGQSPQLLIYAASSLQSGVPDRFSGSGSGTDFTLKISRVEAEDVGVYYCMQALQTPITFGQGTKVEIKRTVAAPSVFIFPPSDEQLKSGTASVVCLLNNFYPREAKVQWKVDNALQSGNSQESVTEQDSKDSTYSLSSTLTLSKADYEKHKVYACEVTHQGLSSPVTKSFNRGEC

SEQ ID NO: 378 - DNA, 708 bp, Artificial Sequence
  IgG1 light chain
atggagaccgacaccctgctgctctgggtgctgctgctctgggtgcccggctccaccggagagatcgtgatgacccagtcccctgccaccctgagcgtgagccccggtgagagggcgaccctgtcttgcagggcgagccagagcgtaagcagcagctacctggcctggtatcaacagaagcccggtcaggcccccaggctgctgatctacggcgccagcaccagggccaccggcatccccgccaggttcagcggcagcggaagcggcaccgagttcaccctcaccatcagctcactgcagagcgaggacttcgccgtgtactactgccagcagtacaacaactggcccctgaccttcggtggcggcacaaaagtggaaatcaagaggaccgtggccgcccccagcgtgttcatcttccctcccagcgacgagcagctgaagtctggcaccgccagcgtggtgtgcctgctgaacaacttctacccccgcgaggccaaggtgcagtggaaggtggacaacgccctgcagagcggcaacagccaggagagcgtgaccgagcaggactccaaggacagcacctacagcctgagcagcaccctgaccctgagcaaggccgactacgagaagcacaaggtgtacgcctgcgaggtgacccaccagggactgtctagccccgtgaccaagagcttcaaccggggcgagtgctaa

SEQ ID NO: 379 - protein, 235 aa, Artificial Sequence
  IgG1 light chain
METDTLLLWVLLLWVPGSTGEIVMTQSPATLSVSPGERATLSCRASQSVSSSYLAWYQQKPGQAPRLLIYGASTRATGIPARFSGSGSGTEFTLTISSLQSEDFAVYYCQQYNNWPLTFGGGTKVEIKRTVAAPSVFIFPPSDEQLKSGTASVVCLLNNFYPREAKVQWKVDNALQSGNSQESVTEQDSKDSTYSLSSTLTLSKADYEKHKVYACEVTHQGLSSPVTKSFNRGEC

SEQ ID NO: 380 - DNA, 705 bp, Artificial Sequence
  IgG1 light chain
atggagaccgacaccctgctgctctgggtgctgctgctctgggtgcccggctccaccggagacatccagatgacccagagccccagctccctgagcgccagcgtgggcgacagggtgaccattacctgtagggccagccagagcatcagctcatacctgaactggtatcaacagaagcccggcaaggcccccaagctgctgatctacgccgcgagcagccttcaaagcggcgtgcccagcaggttcagcggcagtggcagcggcaccgacttcaccctcaccatcagtagcctgcagcccgaggacttcgccacctactactgccaacaggccaactcattccccatcaccttcggccagggcaccaagttggagatcaagaggaccgtggccgcccccagcgtgttcatcttccctcccagcgacgagcagctgaagtctggcaccgccagcgtggtgtgcctgctgaacaacttctacccccgcgaggccaaggtgcagtggaaggtggacaacgccctgcagagcggcaacagccaggagagcgtgaccgagcaggactccaaggacagcacctacagcctgagcagcaccctgaccctgagcaaggccgactacgagaagcacaaggtgtacgcctgcgaggtgacccaccagggactgtctagccccgtgaccaagagcttcaaccggggcgagtgctaa

SEQ ID NO: 381 - protein, 234 aa, Artificial Sequence
  IgG1 light chain
METDTLLLWVLLLWVPGSTGDIQMTQSPSSLSASVGDRVTITCRASQSISSYLNWYQQKPGKAPKLLIYAASSLQSGVPSRFSGSGSGTDFTLTISSLQPEDFATYYCQQANSFPITFGQGTKLEIKRTVAAPSVFIFPPSDEQLKSGTASVVCLLNNFYPREAKVQWKVDNALQSGNSQESVTEQDSKDSTYSLSSTLTLSKADYEKHKVYACEVTHQGLSSPVTKSFNRGEC

SEQ ID NO: 382 - DNA, 705 bp, Artificial Sequence
  IgG1 light chain
atggagaccgacaccctgctgctctgggtgctgctgctctgggtgcccggctccaccggagacatccagatgacccagagccccagttccctgagcgccagcgtgggcgacagggtgaccataacctgccgagccagcgagaacatcggcacctggctggcctggtatcagcagaagcccggcaaggcccccaagctgcttatctacaaggcctctagcctggacagcggcgtgcccagcaggttcagcggcagcggaagcggcaccgacttcacactgaccatcagctccctgcagcccgaggacttcgccacctactactgccagcagagctacagcaccccctacaccttcggccagggcaccaagttggagatcaagaggaccgtggccgcccccagcgtgttcatcttccctcccagcgacgagcagctgaagtctggcaccgccagcgtggtgtgcctgctgaacaacttctacccccgcgaggccaaggtgcagtggaaggtggacaacgccctgcagagcggcaacagccaggagagcgtgaccgagcaggactccaaggacagcacctacagcctgagcagcaccctgaccctgagcaaggccgactacgagaagcacaaggtgtacgcctgcgaggtgacccaccagggactgtctagccccgtgaccaagagcttcaaccggggcgagtgctaa

SEQ ID NO: 383 - protein, 234 aa, Artificial Sequence
  IgG1 light chain
METDTLLLWVLLLWVPGSTGDIQMTQSPSSLSASVGDRVTITCRASENIGTWLAWYQQKPGKAPKLLIYKASSLDSGVPSRFSGSGSGTDFTLTISSLQPEDFATYYCQQSYSTPYTFGQGTKLEIKRTVAAPSVFIFPPSDEQLKSGTASVVCLLNNFYPREAKVQWKVDNALQSGNSQESVTEQDSKDSTYSLSSTLTLSKADYEKHKVYACEVTHQGLSSPVTKSFNRGEC

SEQ ID NO: 384 - DNA, 705 bp, Artificial Sequence
  IgG1 light chain
atggagaccgacaccctgctgctctgggtgctgctgctctgggtgcccggctccaccggagacatccagatgacccagagccccagctccctgagcgccagcgtgggcgacagggtgaccatcacctgtagggccagccaaggcatcggcagctggctcgcctggtatcaacagaagcccggcaaggccccgaagctccttatccacgccgccaccaagctgcagaccggcgtgcccagcaggttcagcggcagtggcagcggcaccgacttcaccctcaccatcagcagcctgcagcccgaggacttcgccacctactactgtcagcagagctacagcacccccttcaccttcggccctgggaccaaggtggacatcaagaggaccgtggccgcccccagcgtgttcatcttccctcccagcgacgagcagctgaagtctggcaccgccagcgtggtgtgcctgctgaacaacttctacccccgcgaggccaaggtgcagtggaaggtggacaacgccctgcagagcggcaacagccaggagagcgtgaccgagcaggactccaaggacagcacctacagcctgagcagcaccctgaccctgagcaaggccgactacgagaagcacaaggtgtacgcctgcgaggtgacccaccagggactgtctagccccgtgaccaagagcttcaaccggggcgagtgctaa

SEQ ID NO: 385 - protein, 234 aa, Artificial Sequence
  IgG1 light chain
METDTLLLWVLLLWVPGSTGDIQMTQSPSSLSASVGDRVTITCRASQGIGSWLAWYQQKPGKAPKLLIHAATKLQTGVPSRFSGSGSGTDFTLTISSLQPEDFATYYCQQSYSTPFTFGPGTKVDIKRTVAAPSVFIFPPSDEQLKSGTASVVCLLNNFYPREAKVQWKVDNALQSGNSQESVTEQDSKDSTYSLSSTLTLSKADYEKHKVYACEVTHQGLSSPVTKSFNRGEC

SEQ ID NO: 386 - DNA, 705 bp, Artificial Sequence
  IgG1 light chain
atggagaccgacaccctgctgctctgggtgctgctgctctgggtgcccggctccaccggagacatccagatgacccagagccccagcagcctgagcgccagcgtgggcgacagggtgaccataacctgccgagccagcagggccatcggcaacaacctgagctggtatcaacagaagcccggcaaggcccccaagctgctgatctacaccgctagcagtctgcaaagcggcgtgccaagcaggttcagcggcagtggcagcggcaccgactttaccctgaccatcagctctctgcagcccgaggacttcgccacctactactgccagcaatcttacagcaccccctacaccttcggccagggtaccaaagtggagatcaagaggaccgtggccgcccccagcgtgttcatcttccctcccagcgacgagcagctgaagtctggcaccgccagcgtggtgtgcctgctgaacaacttctacccccgcgaggccaaggtgcagtggaaggtggacaacgccctgcagagcggcaacagccaggagagcgtgaccgagcaggactccaaggacagcacctacagcctgagcagcaccctgaccctgagcaaggccgactacgagaagcacaaggtgtacgcctgcgaggtgacccaccagggactgtctagccccgtgaccaagagcttcaaccggggcgagtgctaa

SEQ ID NO: 387 - protein, 234 aa, Artificial Sequence
  IgG1 light chain
METDTLLLWVLLLWVPGSTGDIQMTQSPSSLSASVGDRVTITCRASRAIGNNLSWYQQKPGKAPKLLIYTASSLQSGVPSRFSGSGSGTDFTLTISSLQPEDFATYYCQQSYSTPYTFGQGTKVEIKRTVAAPSVFIFPPSDEQLKSGTASVVCLLNNFYPREAKVQWKVDNALQSGNSQESVTEQDSKDSTYSLSSTLTLSKADYEKHKVYACEVTHQGLSSPVTKSFNRGEC

SEQ ID NO: 388 - DNA, 705 bp, Artificial Sequence
  IgG1 light chain
atggagaccgacaccctgctgctctgggtgctgctgctctgggtgcccggctccaccggagacatccagatgacccagagccccagctccctgagcgccagcgtgggcgacagggtaaccatcacctgccaggccagccagagcatcagcagctacctgaactggtatcagcaaaagcccggcaaggcccccaaactgttgatatacgccgccagtagcctgcaaagcggcgtgcccagcaggttcagcggcagcggaagcggcaccgacttcaccctgacaatcagctctctgcagcccgaggacttcgccacctactactgccaacagggctacttgaccccctacaccttcggccaggggaccaagttggagatcaagaggaccgtggccgcccccagcgtgttcatcttccctcccagcgacgagcagctgaagtctggcaccgccagcgtggtgtgcctgctgaacaacttctacccccgcgaggccaaggtgcagtggaaggtggacaacgccctgcagagcggcaacagccaggagagcgtgaccgagcaggactccaaggacagcacctacagcctgagcagcaccctgaccctgagcaaggccgactacgagaagcacaaggtgtacgcctgcgaggtgacccaccagggactgtctagccccgtgaccaagagcttcaaccggggcgagtgctaa

SEQ ID NO: 389 - protein, 234 aa, Artificial Sequence
  IgG1 light chain
METDTLLLWVLLLWVPGSTGDIQMTQSPSSLSASVGDRVTITCQASQSISSYLNWYQQKPGKAPKLLIYAASSLQSGVPSRFSGSGSGTDFTLTISSLQPEDFATYYCQQGYLTPYTFGQGTKLEIKRTVAAPSVFIFPPSDEQLKSGTASVVCLLNNFYPREAKVQWKVDNALQSGNSQESVTEQDSKDSTYSLSSTLTLSKADYEKHKVYACEVTHQGLSSPVTKSFNRGEC

SEQ ID NO: 390 - DNA, 705 bp, Artificial Sequence
  IgG1 light chain
atggagaccgacaccctgctgctctgggtgctgctgctctgggtgcccggctccaccggagagatcgtgatgacccagagcccagccactctgagcgtaagccccggagagagggccacccttagctgcagggccagccagagcgttagctcctacctggcctggtatcagcagaaaccgggccaggcccccaggttgctgatctacggcgccagcaccagggcgagtggaatccccgccaggttcagcggctccggcagcggcaccgagttcacactgaccattagcagcctgcagagcgaggacttcgccgtgtactactgccagcagtactacagctacccctggaccttcggacagggaaccaaggtggagatcaagaggaccgtggccgcccccagcgtgttcatcttccctcccagcgacgagcagctgaagtctggcaccgccagcgtggtgtgcctgctgaacaacttctacccccgcgaggccaaggtgcagtggaaggtggacaacgccctgcagagcggcaacagccaggagagcgtgaccgagcaggactccaaggacagcacctacagcctgagcagcaccctgaccctgagcaaggccgactacgagaagcacaaggtgtacgcctgcgaggtgacccaccagggactgtctagccccgtgaccaagagcttcaaccggggcgagtgctaa

SEQ ID NO: 391 - protein, 234 aa, Artificial Sequence
  IgG1 light chain
METDTLLLWVLLLWVPGSTGEIVMTQSPATLSVSPGERATLSCRASQSVSSYLAWYQQKPGQAPRLLIYGASTRASGIPARFSGSGSGTEFTLTISSLQSEDFAVYYCQQYYSYPWTFGQGTKVEIKRTVAAPSVFIFPPSDEQLKSGTASVVCLLNNFYPREAKVQWKVDNALQSGNSQESVTEQDSKDSTYSLSSTLTLSKADYEKHKVYACEVTHQGLSSPVTKSFNRGEC

SEQ ID NO: 392 - DNA, 723 bp, Artificial Sequence
  IgG1 light chain
atggagaccgacaccctgctgctctgggtgctgctgctctgggtgcccggctccaccggagacatcgtgatgacccagagccccgacagcctggccgtgagcctgggcgagagggccaccatcaactgcaagagcagccagagcgtgctgtatagcagcaacaacaagaactacctggcctggtatcaacagaagcccggtcagcccccaaagctgctgatctactgggctagcaccagggagagcggcgtgcctgacaggttcagcggcagcggaagcggcaccgacttcaccctgaccatctccagtttgcaggccgaggacgtcgccgtgtactactgccagcagtactacggcacccctctgaccttcggaggcggaactaaggtggagatcaagaggaccgtggccgcccccagcgtgttcatcttccctcccagcgacgagcagctgaagtctggcaccgccagcgtggtgtgcctgctgaacaacttctacccccgcgaggccaaggtgcagtggaaggtggacaacgccctgcagagcggcaacagccaggagagcgtgaccgagcaggactccaaggacagcacctacagcctgagcagcaccctgaccctgagcaaggccgactacgagaagcacaaggtgtacgcctgcgaggtgacccaccagggactgtctagccccgtgaccaagagcttcaaccggggcgagtgctaa

SEQ ID NO: 393 - protein, 240 aa, Artificial Sequence
  IgG1 light chain
METDTLLLWVLLLWVPGSTGDIVMTQSPDSLAVSLGERATINCKSSQSVLYSSNNKNYLAWYQQKPGQPPKLLIYWASTRESGVPDRFSGSGSGTDFTLTISSLQAEDVAVYYCQQYYGTPLTFGGGTKVEIKRTVAAPSVFIFPPSDEQLKSGTASVVCLLNNFYPREAKVQWKVDNALQSGNSQESVTEQDSKDSTYSLSSTLTLSKADYEKHKVYACEVTHQGLSSPVTKSFNRGEC

SEQ ID NO: 394 - DNA, 705 bp, Artificial Sequence
  IgG1 light chain
atggagaccgacaccctgctgctctgggtgctgctgctctgggtgcccggctccaccggagacatccagatgacccagagccccagcagcctgtccgccagcgtgggcgaccgcgtgaccatcacctgtagggccagccagagcattagcagctatctgaactggtatcaacaaaagcccggcaaagcccccaagctgctgatctacgacgccagctctctgaggagcggcgtgccaagcaggttcagcggcagtggcagcggcaccgacttcaccctgaccatttccagcctgcagcccgaggacttcgccacctactactgccaacagagctacagcaccccacccactttcggccaaggcaccaaggtggagatcaagaggaccgtggccgcccccagcgtgttcatcttccctcccagcgacgagcagctgaagtctggcaccgccagcgtggtgtgcctgctgaacaacttctacccccgcgaggccaaggtgcagtggaaggtggacaacgccctgcagagcggcaacagccaggagagcgtgaccgagcaggactccaaggacagcacctacagcctgagcagcaccctgaccctgagcaaggccgactacgagaagcacaaggtgtacgcctgcgaggtgacccaccagggactgtctagccccgtgaccaagagcttcaaccggggcgagtgctaa

SEQ ID NO: 395 - protein, 234 aa, Artificial Sequence
  IgG1 light chain
METDTLLLWVLLLWVPGSTGDIQMTQSPSSLSASVGDRVTITCRASQSISSYLNWYQQKPGKAPKLLIYDASSLRSGVPSRFSGSGSGTDFTLTISSLQPEDFATYYCQQSYSTPPTFGQGTKVEIKRTVAAPSVFIFPPSDEQLKSGTASVVCLLNNFYPREAKVQWKVDNALQSGNSQESVTEQDSKDSTYSLSSTLTLSKADYEKHKVYACEVTHQGLSSPVTKSFNRGEC

SEQ ID NO: 396 - DNA, 705 bp, Artificial Sequence
  IgG1 light chain
atggagaccgacaccctgctgctctgggtgctgctgctctgggtgcccggctccaccggagacatccagatgacccagagcccaagcagcctgagcgccagcgtgggcgacagggtgacgatcacctgccaggccagccaggatatacacaactacctgaattggtatcagcagaagcccggcaaggcccccaagctcctgatctacaccgccagcaccctgcagagcggcgtgcccagcaggttcagcggcagcggaagcggcaccgacttcacactgaccatcagctccctgcaacccgaggacttcgccacctactactgccagcagagctacaacatccccatcactgtgggccagggcaccaggctggagatcaagaggaccgtggccgcccccagcgtgttcatcttccctcccagcgacgagcagctgaagtctggcaccgccagcgtggtgtgcctgctgaacaacttctacccccgcgaggccaaggtgcagtggaaggtggacaacgccctgcagagcggcaacagccaggagagcgtgaccgagcaggactccaaggacagcacctacagcctgagcagcaccctgaccctgagcaaggccgactacgagaagcacaaggtgtacgcctgcgaggtgacccaccagggactgtctagccccgtgaccaagagcttcaaccggggcgagtgctaa

SEQ ID NO: 397 - protein, 234 aa, Artificial Sequence
  IgG1 light chain
METDTLLLWVLLLWVPGSTGDIQMTQSPSSLSASVGDRVTITCQASQDIHNYLNWYQQKPGKAPKLLIYTASTLQSGVPSRFSGSGSGTDFTLTISSLQPEDFATYYCQQSYNIPITVGQGTRLEIKRTVAAPSVFIFPPSDEQLKSGTASVVCLLNNFYPREAKVQWKVDNALQSGNSQESVTEQDSKDSTYSLSSTLTLSKADYEKHKVYACEVTHQGLSSPVTKSFNRGEC

SEQ ID NO: 398 - DNA, 720 bp, Artificial Sequence
  IgG1 light chain
atggagaccgacaccctgctgctctgggtgctgctgctctgggtgcccggctccaccggagacatcgtgatgacccaaagccctctgagtctgcccgtgacccctggcgagcccgccagcataagctgcaggagcagccagagcctgctgcacagcaacggctacaactacctggactggtacctgcagaagcccggtcaatctccacagctgctgatctacggcgcaagcagcctgcaaagcggcgtgcccgacaggttcagcggcagcggctccggcaccgacttcaccctgaaaatctctagggtggaggccgaggacgtgggcgtgtactactgtatgcagggcctgcacacacccccgaccttcggccagggcaccaagctggagatcaagaggaccgtggccgcccccagcgtgttcatcttccctcccagcgacgagcagctgaagtctggcaccgccagcgtggtgtgcctgctgaacaacttctacccccgcgaggccaaggtgcagtggaaggtggacaacgccctgcagagcggcaacagccaggagagcgtgaccgagcaggactccaaggacagcacctacagcctgagcagcaccctgaccctgagcaaggccgactacgagaagcacaaggtgtacgcctgcgaggtgacccaccagggactgtctagccccgtgaccaagagcttcaaccggggcgagtgctaa

SEQ ID NO: 399 - protein, 239 aa, Artificial Sequence
  IgG1 light chain
METDTLLLWVLLLWVPGSTGDIVMTQSPLSLPVTPGEPASISCRSSQSLLHSNGYNYLDWYLQKPGQSPQLLIYGASSLQSGVPDRFSGSGSGTDFTLKISRVEAEDVGVYYCMQGLHTPPTFGQGTKLEIKRTVAAPSVFIFPPSDEQLKSGTASVVCLLNNFYPREAKVQWKVDNALQSGNSQESVTEQDSKDSTYSLSSTLTLSKADYEKHKVYACEVTHQGLSSPVTKSFNRGEC

SEQ ID NO: 400 - DNA, 705 bp, Artificial Sequence
  IgG1 light chain
atggagaccgacaccctgctgctctgggtgctgctgctctgggtgcccggctccaccggagacatccagatgacccagagccccagcagcctgagcgccagcgtgggcgacagggtcaccatcacctgcagagccagccagagcatcagctcatacctgaactggtatcaacagaagcccggcaaggcccccaagctgcttatctacgacgccagcaacctggagaccggcgtgccgagcaggttcagcgggagcggcagcggaaccgacttcaccctgaccataagtagtctgcagcccgaggacttcgccacctactactgccagcagtcctacggcactcccctgacattcggaggcggaactaaggtggacatcaagaggaccgtggccgcccccagcgtgttcatcttccctcccagcgacgagcagctgaagtctggcaccgccagcgtggtgtgcctgctgaacaacttctacccccgcgaggccaaggtgcagtggaaggtggacaacgccctgcagagcggcaacagccaggagagcgtgaccgagcaggactccaaggacagcacctacagcctgagcagcaccctgaccctgagcaaggccgactacgagaagcacaaggtgtacgcctgcgaggtgacccaccagggactgtctagccccgtgaccaagagcttcaaccggggcgagtgctaa

SEQ ID NO: 401 - protein, 234 aa, Artificial Sequence
  IgG1 light chain
METDTLLLWVLLLWVPGSTGDIQMTQSPSSLSASVGDRVTITCRASQSISSYLNWYQQKPGKAPKLLIYDASNLETGVPSRFSGSGSGTDFTLTISSLQPEDFATYYCQQSYGTPLTFGGGTKVDIKRTVAAPSVFIFPPSDEQLKSGTASVVCLLNNFYPREAKVQWKVDNALQSGNSQESVTEQDSKDSTYSLSSTLTLSKADYEKHKVYACEVTHQGLSSPVTKSFNRGEC

SEQ ID NO: 402 - DNA, 705 bp, Artificial Sequence
  IgG1 light chain
atggagaccgacaccctgctgctctgggtgctgctgctctgggtgcccggctccaccggagacatccagatgacccagagccccagcagcctcagcgccagcgtgggcgacagggttaccatcacgtgcagggccagccaggacatcaacaacttcctggtgtggtatcaacagaagcccggcaaggcccccaagctgctgatctacgacgccagcaacctggagaccggcgtgccgagcaggttcagcggcagtggcagcggcaccgacttcaccctgaccattagtagcctgcagcccgaggacttcgccacctactactgtcagcaggcctacagcttccccctgacattcggtggcggcactaaggtggagatcaagaggaccgtggccgcccccagcgtgttcatcttccctcccagcgacgagcagctgaagtctggcaccgccagcgtggtgtgcctgctgaacaacttctacccccgcgaggccaaggtgcagtggaaggtggacaacgccctgcagagcggcaacagccaggagagcgtgaccgagcaggactccaaggacagcacctacagcctgagcagcaccctgaccctgagcaaggccgactacgagaagcacaaggtgtacgcctgcgaggtgacccaccagggactgtctagccccgtgaccaagagcttcaaccggggcgagtgctaa

SEQ ID NO: 403 - protein, 234 aa, Artificial Sequence
  IgG1 light chain
METDTLLLWVLLLWVPGSTGDIQMTQSPSSLSASVGDRVTITCRASQDINNFLVWYQQKPGKAPKLLIYDASNLETGVPSRFSGSGSGTDFTLTISSLQPEDFATYYCQQAYSFPLTFGGGTKVEIKRTVAAPSVFIFPPSDEQLKSGTASVVCLLNNFYPREAKVQWKVDNALQSGNSQESVTEQDSKDSTYSLSSTLTLSKADYEKHKVYACEVTHQGLSSPVTKSFNRGEC

SEQ ID NO: 404 - DNA, 705 bp, Artificial Sequence
  IgG1 light chain
atggagaccgacaccctgctgctctgggtgctgctgctctgggtgcccggctccaccggagacatccagatgacccagagccccagtagcctgagcgccagcgtgggcgaccgcgtgaccatcacctgtagggccagccagagcatcagcagtcacctgcattggtatcagcaaaagcccggcaaggcccccaagctcctgatctacgccgcctcctccctgcagagcggcgtgcccagcaggttcagcggcagcggaagtggcaccgacttcaccctgaccataagcagcctgcagcccgaggacttcgccacctactactgccagcagagctacagctcccccgtgaccttcggcggagggactaaggtggaaatcaagaggaccgtggccgcccccagcgtgttcatcttccctcccagcgacgagcagctgaagtctggcaccgccagcgtggtgtgcctgctgaacaacttctacccccgcgaggccaaggtgcagtggaaggtggacaacgccctgcagagcggcaacagccaggagagcgtgaccgagcaggactccaaggacagcacctacagcctgagcagcaccctgaccctgagcaaggccgactacgagaagcacaaggtgtacgcctgcgaggtgacccaccagggactgtctagccccgtgaccaagagcttcaaccggggcgagtgctaa

SEQ ID NO: 405 - protein, 234 aa, Artificial Sequence
  IgG1 light chain
METDTLLLWVLLLWVPGSTGDIQMTQSPSSLSASVGDRVTITCRASQSISSHLHWYQQKPGKAPKLLIYAASSLQSGVPSRFSGSGSGTDFTLTISSLQPEDFATYYCQQSYSSPVTFGGGTKVEIKRTVAAPSVFIFPPSDEQLKSGTASVVCLLNNFYPREAKVQWKVDNALQSGNSQESVTEQDSKDSTYSLSSTLTLSKADYEKHKVYACEVTHQGLSSPVTKSFNRGEC

SEQ ID NO: 406 - DNA, 720 bp, Artificial Sequence
  IgG1 light chain
atggagaccgacaccctgctgctctgggtgctgctgctctgggtgcccggctccaccggagacatcgtgatgacccagagccctctgagcctgcccgttacccccggtgagcccgccagcatcagctgcaggagcagccagtcactgctgcacagcaacggctacaactacctggactggtacctccagaagcctggtcagtctccacagctgctgatctacttgggcagcaacagggccagcggcgtgcccgacaggttcagcggcagcgggagcggcaccgactttaccctgaagataagcagggtggaggccgaggacgtgggcgtgtactactgtatgcagggcctgcaaacccctcccaccttcgggggaggaactaaggtggagatcaagaggaccgtggccgcccccagcgtgttcatcttccctcccagcgacgagcagctgaagtctggcaccgccagcgtggtgtgcctgctgaacaacttctacccccgcgaggccaaggtgcagtggaaggtggacaacgccctgcagagcggcaacagccaggagagcgtgaccgagcaggactccaaggacagcacctacagcctgagcagcaccctgaccctgagcaaggccgactacgagaagcacaaggtgtacgcctgcgaggtgacccaccagggactgtctagccccgtgaccaagagcttcaaccggggcgagtgctaa

SEQ ID NO: 407 - protein, 239 aa, Artificial Sequence
  IgG1 light chain
METDTLLLWVLLLWVPGSTGDIVMTQSPLSLPVTPGEPASISCRSSQSLLHSNGYNYLDWYLQKPGQSPQLLIYLGSNRASGVPDRFSGSGSGTDFTLKISRVEAEDVGVYYCMQGLQTPPTFGGGTKVEIKRTVAAPSVFIFPPSDEQLKSGTASVVCLLNNFYPREAKVQWKVDNALQSGNSQESVTEQDSKDSTYSLSSTLTLSKADYEKHKVYACEVTHQGLSSPVTKSFNRGEC

SEQ ID NO: 408 - DNA, 705 bp, Artificial Sequence
  IgG1 light chain
atggagaccgacaccctgctgctctgggtgctgctgctctgggtgcccggctccaccggagacatccagatgacccagagccccagctccctgagcgccagcgtgggcgacagggtgaccatcacctgtagagccagccagagcatcagctcttacctgaattggtatcagcagaagcccggcaaggcccccaagctgttgatatacgccgcaagcagcctgcagagtggcgtgcccagcaggttcagcggcagtggcagcggcaccgacttcaccctcaccattagctctctgcaacccgaggacttcgccacctactactgccagcaaacttactccaccccctacaccttcggccagggcaccaaggtggagatcaagaggaccgtggccgcccccagcgtgttcatcttccctcccagcgacgagcagctgaagtctggcaccgccagcgtggtgtgcctgctgaacaacttctacccccgcgaggccaaggtgcagtggaaggtggacaacgccctgcagagcggcaacagccaggagagcgtgaccgagcaggactccaaggacagcacctacagcctgagcagcaccctgaccctgagcaaggccgactacgagaagcacaaggtgtacgcctgcgaggtgacccaccagggactgtctagccccgtgaccaagagcttcaaccggggcgagtgctaa

SEQ ID NO: 409 - protein, 234 aa, Artificial Sequence
  IgG1 light chain
METDTLLLWVLLLWVPGSTGDIQMTQSPSSLSASVGDRVTITCRASQSISSYLNWYQQKPGKAPKLLIYAASSLQSGVPSRFSGSGSGTDFTLTISSLQPEDFATYYCQQTYSTPYTFGQGTKVEIKRTVAAPSVFIFPPSDEQLKSGTASVVCLLNNFYPREAKVQWKVDNALQSGNSQESVTEQDSKDSTYSLSSTLTLSKADYEKHKVYACEVTHQGLSSPVTKSFNRGEC

SEQ ID NO: 410 - DNA, 705 bp, Artificial Sequence
  IgG1 light chain
atggagaccgacaccctgctgctctgggtgctgctgctctgggtgcccggctccaccggagagatcgtgatgacccagagccccgctaccctgagcgtgagtcccggcgagagggcgaccctcagctgcagggccagccagggcgtgagcagctacctggcctggtatcaacagaagccgggtcaagcccccaggctcttgatctacggcgccagcaccagggcaaccggcatccccgccaggttcagcggcagtggcagcggcaccgagttcacactgaccatcagcagcctgcagagcgaggacttcgccgtgtactactgccagcagtacaggagcttccccctgaccttcggcggaggaaccaaggtggagattaagaggaccgtggccgcccccagcgtgttcatcttccctcccagcgacgagcagctgaagtctggcaccgccagcgtggtgtgcctgctgaacaacttctacccccgcgaggccaaggtgcagtggaaggtggacaacgccctgcagagcggcaacagccaggagagcgtgaccgagcaggactccaaggacagcacctacagcctgagcagcaccctgaccctgagcaaggccgactacgagaagcacaaggtgtacgcctgcgaggtgacccaccagggactgtctagccccgtgaccaagagcttcaaccggggcgagtgctaa

SEQ ID NO: 411 - protein, 234 aa, Artificial Sequence
  IgG1 light chain
METDTLLLWVLLLWVPGSTGEIVMTQSPATLSVSPGERATLSCRASQGVSSYLAWYQQKPGQAPRLLIYGASTRATGIPARFSGSGSGTEFTLTISSLQSEDFAVYYCQQYRSFPLTFGGGTKVEIKRTVAAPSVFIFPPSDEQLKSGTASVVCLLNNFYPREAKVQWKVDNALQSGNSQESVTEQDSKDSTYSLSSTLTLSKADYEKHKVYACEVTHQGLSSPVTKSFNRGEC

SEQ ID NO: 412 - DNA, 705 bp, Artificial Sequence
  IgG1 light chain
atggagaccgacaccctgctgctctgggtgctgctgctctgggtgcccggctccaccggagacatccagatgacccagagccccagctccctgagcgccagcgtgggcgacagggtgaccatcacttgcagggccagccagcacatcaacagcaacctgaactggtatcagcagaagcccggcaaggcccccaagctgctcatctacggcgccagtagcctgcagagcggcgtgcccagcaggttcagcggctcaggcagcggaactgactttaccctgacaattagcagcctccagcccgaggacttcgccacctactactgccagcaaagctacaccacccccttcaccttcggccctggaaccaaggtggacatcaagaggaccgtggccgcccccagcgtgttcatcttccctcccagcgacgagcagctgaagtctggcaccgccagcgtggtgtgcctgctgaacaacttctacccccgcgaggccaaggtgcagtggaaggtggacaacgccctgcagagcggcaacagccaggagagcgtgaccgagcaggactccaaggacagcacctacagcctgagcagcaccctgaccctgagcaaggccgactacgagaagcacaaggtgtacgcctgcgaggtgacccaccagggactgtctagccccgtgaccaagagcttcaaccggggcgagtgctaa

SEQ ID NO: 413 - protein, 234 aa, Artificial Sequence
  IgG1 light chain
METDTLLLWVLLLWVPGSTGDIQMTQSPSSLSASVGDRVTITCRASQHINSNLNWYQQKPGKAPKLLIYGASSLQSGVPSRFSGSGSGTDFTLTISSLQPEDFATYYCQQSYTTPFTFGPGTKVDIKRTVAAPSVFIFPPSDEQLKSGTASVVCLLNNFYPREAKVQWKVDNALQSGNSQESVTEQDSKDSTYSLSSTLTLSKADYEKHKVYACEVTHQGLSSPVTKSFNRGEC

SEQ ID NO: 414 - DNA, 705 bp, Artificial Sequence
  IgG1 light chain
atggagaccgacaccctgctgctctgggtgctgctgctctgggtgcccggctccaccggagacatccagatgacccagagccccagctccctgagcgccagcgtgggcgacagggtgaccatcacctgtagggccagccagagcatctcaagctacctgaactggtatcaacagaagcccggcaaggcccccaagctgctgatttacgacgccagcaatttgcagagtggcgtgcccagcaggttcagcggcagcggaagcggcaccgacttcaccctcaccatcagctcactgcagcccgaggacttcgccacctactactgtcagcaaagctacagcacacccctgactttcggccagggcaccaggctggagatcaagaggaccgtggccgcccccagcgtgttcatcttccctcccagcgacgagcagctgaagtctggcaccgccagcgtggtgtgcctgctgaacaacttctacccccgcgaggccaaggtgcagtggaaggtggacaacgccctgcagagcggcaacagccaggagagcgtgaccgagcaggactccaaggacagcacctacagcctgagcagcaccctgaccctgagcaaggccgactacgagaagcacaaggtgtacgcctgcgaggtgacccaccagggactgtctagccccgtgaccaagagcttcaaccggggcgagtgctaa

SEQ ID NO: 415 - protein, 234 aa, Artificial Sequence
  IgG1 light chain
METDTLLLWVLLLWVPGSTGDIQMTQSPSSLSASVGDRVTITCRASQSISSYLNWYQQKPGKAPKLLIYDASNLQSGVPSRFSGSGSGTDFTLTISSLQPEDFATYYCQQSYSTPLTFGQGTRLEIKRTVAAPSVFIFPPSDEQLKSGTASVVCLLNNFYPREAKVQWKVDNALQSGNSQESVTEQDSKDSTYSLSSTLTLSKADYEKHKVYACEVTHQGLSSPVTKSFNRGEC

SEQ ID NO: 416 - DNA, 705 bp, Artificial Sequence; identical to SEQ ID NO: 326
  IgG1 light chain

SEQ ID NO: 417 - protein, 234 aa, Artificial Sequence; identical to SEQ ID NO: 327
  IgG1 light chain

SEQ ID NO: 418 - DNA, 720 bp, Artificial Sequence
  IgG1 light chain
atggagaccgacaccctgctgctctgggtgctgctgctctgggtgcccggctccaccggagacatcgtgatgacccagagccccctgagcctgcccgtgacccccggagagcccgccagcataagctgcaggagcagccaaagcctgctgcacagcaacggctacaactacctggactggtacctgcagaaacccggtcagagtccccagctgctgatatacgccgcaagcaccctgcagtcaggcgtgcccgacaggttcagcggcagtggcagcggcactgacttcaccctgaagatcagccgcgtggaggccgaggacgtgggcgtgtactactgtatgcagggcgctcactggccccctactttcggccagggcaccaagctggagatcaagaggaccgtggccgcccccagcgtgttcatcttccctcccagcgacgagcagctgaagtctggcaccgccagcgtggtgtgcctgctgaacaacttctacccccgcgaggccaaggtgcagtggaaggtggacaacgccctgcagagcggcaacagccaggagagcgtgaccgagcaggactccaaggacagcacctacagcctgagcagcaccctgaccctgagcaaggccgactacgagaagcacaaggtgtacgcctgcgaggtgacccaccagggactgtctagccccgtgaccaagagcttcaaccggggcgagtgctaa

SEQ ID NO: 419 - protein, 239 aa, Artificial Sequence
  IgG1 light chain
METDTLLLWVLLLWVPGSTGDIVMTQSPLSLPVTPGEPASISCRSSQSLLHSNGYNYLDWYLQKPGQSPQLLIYAASTLQSGVPDRFSGSGSGTDFTLKISRVEAEDVGVYYCMQGAHWPPTFGQGTKLEIKRTVAAPSVFIFPPSDEQLKSGTASVVCLLNNFYPREAKVQWKVDNALQSGNSQESVTEQDSKDSTYSLSSTLTLSKADYEKHKVYACEVTHQGLSSPVTKSFNRGEC

SEQ ID NO: 420 - DNA, 705 bp, Artificial Sequence
  IgG1 light chain
atggagaccgacaccctgctgctctgggtgctgctgctctgggtgcccggctccaccggagacatccagatgacccagagccccagcagcctgagcgccagcgtgggcgacagggttaccatcacctgccaggccaaccagcacatcggcaactcactgaattggtatcagcaaaagcccggcaaggcccccaagctgctgatcttcgccgccagtagactgcagagcggcgtgccctccaggttcagcggaagcggcagcggcaccgacttcaccctgaccatttcaagcctgcagcccgaggacttcgccacctactactgccaacagagctacggcacccccttgaccttcggcggaggaaccaaggtggaaatcaagaggaccgtggccgcccccagcgtgttcatcttccctcccagcgacgagcagctgaagtctggcaccgccagcgtggtgtgcctgctgaacaacttctacccccgcgaggccaaggtgcagtggaaggtggacaacgccctgcagagcggcaacagccaggagagcgtgaccgagcaggactccaaggacagcacctacagcctgagcagcaccctgaccctgagcaaggccgactacgagaagcacaaggtgtacgcctgcgaggtgacccaccagggactgtctagccccgtgaccaagagcttcaaccggggcgagtgctaa

SEQ ID NO: 421 - protein, 234 aa, Artificial Sequence
  IgG1 light chain
METDTLLLWVLLLWVPGSTGDIQMTQSPSSLSASVGDRVTITCQANQHIGNSLNWYQQKPGKAPKLLIFAASRLQSGVPSRFSGSGSGTDFTLTISSLQPEDFATYYCQQSYGTPLTFGGGTKVEIKRTVAAPSVFIFPPSDEQLKSGTASVVCLLNNFYPREAKVQWKVDNALQSGNSQESVTEQDSKDSTYSLSSTLTLSKADYEKHKVYACEVTHQGLSSPVTKSFNRGEC

SEQ ID NO: 422 - DNA, 723 bp, Artificial Sequence
  IgG1 light chain
atggagaccgacaccctgctgctctgggtgctgctgctctgggtgcccggctccaccggagacatcgtgatgacccagagccccgacagcctggctgtgagcctgggcgagagggccaccatcaactgcaagagcagccagagcgtgctgtatagcagcagcaacgagaactacctggcgtggtatcaacagaaacccggccagcctcccaagctgctcatctactgggcctctatcaggggcagcggcgtgcctgacaggttcagcggctcagggagcggcaccgacttcaccctgaccatcagcagccttcaggccgaggacgtggccgtgtactactgccagcagtactacagcatcccctataccttcggccagggcaccaaggtggagatcaagaggaccgtggccgcccccagcgtgttcatcttccctcccagcgacgagcagctgaagtctggcaccgccagcgtggtgtgcctgctgaacaacttctacccccgcgaggccaaggtgcagtggaaggtggacaacgccctgcagagcggcaacagccaggagagcgtgaccgagcaggactccaaggacagcacctacagcctgagcagcaccctgaccctgagcaaggccgactacgagaagcacaaggtgtacgcctgcgaggtgacccaccagggactgtctagccccgtgaccaagagcttcaaccggggcgagtgctaa

SEQ ID NO: 423 - protein, 240 aa, Artificial Sequence
  IgG1 light chain
METDTLLLWVLLLWVPGSTGDIVMTQSPDSLAVSLGERATINCKSSQSVLYSSSNENYLAWYQQKPGQPPKLLIYWASIRGSGVPDRFSGSGSGTDFTLTISSLQAEDVAVYYCQQYYSIPYTFGQGTKVEIKRTVAAPSVFIFPPSDEQLKSGTASVVCLLNNFYPREAKVQWKVDNALQSGNSQESVTEQDSKDSTYSLSSTLTLSKADYEKHKVYACEVTHQGLSSPVTKSFNRGEC

SEQ ID NO: 424 - DNA, 720 bp, Artificial Sequence
  IgG1 light chain
atggagaccgacaccctgctgctctgggtgctgctgctctgggtgcccggctccaccggagacatcgtgatgacacagagccccctgagcctgcccgtgacccctggcgagcccgccagcatcagctgcaggagcagccagtcactgctgcacagcaacggctacaactacctggactggtacctgcaaaagcccggtcagagtccccagctgctgatctacgccgccagtaccttgcaaaccggcgtgcccgacaggttcagcggcagtggcagcggcaccgacttcaccctgaaaatcagtagggtggaggccgaggacgtgggcgtgtactactgtatgcaagccctgcagaccccacccaccttcggccagggaaccaaggtggaaatcaagaggaccgtggccgcccccagcgtgttcatcttccctcccagcgacgagcagctgaagtctggcaccgccagcgtggtgtgcctgctgaacaacttctacccccgcgaggccaaggtgcagtggaaggtggacaacgccctgcagagcggcaacagccaggagagcgtgaccgagcaggactccaaggacagcacctacagcctgagcagcaccctgaccctgagcaaggccgactacgagaagcacaaggtgtacgcctgcgaggtgacccaccagggactgtctagccccgtgaccaagagcttcaaccggggcgagtgctaa

SEQ ID NO: 425 - protein, 239 aa, Artificial Sequence
  IgG1 light chain
METDTLLLWVLLLWVPGSTGDIVMTQSPLSLPVTPGEPASISCRSSQSLLHSNGYNYLDWYLQKPGQSPQLLIYAASTLQTGVPDRFSGSGSGTDFTLKISRVEAEDVGVYYCMQALQTPPTFGQGTKVEIKRTVAAPSVFIFPPSDEQLKSGTASVVCLLNNFYPREAKVQWKVDNALQSGNSQESVTEQDSKDSTYSLSSTLTLSKADYEKHKVYACEVTHQGLSSPVTKSFNRGEC

SEQ ID NO: 426 - DNA, 708 bp, Artificial Sequence
  IgG1 light chain
atggagaccgacaccctgctgctctgggtgctgctgctctgggtgcccggctccaccggagagatcgtgatgacccagagtcccgcaaccctgagcgtgagtcctggggagagggcgacgctgagttgcagggccagccagagcgtgtacagcagctacctggcctggtatcagcaaaagcccggtcaggcccccaggctgcttatctacggcaccagcagcagggctgcgggcatccccgccaggttcagcgggagcggcagcggcaccgagttcaccctgaccatctcaagccttcagagcgaggactttgccgtgtactactgccagcagtactacagcaccccctacactttcggccagggaaccaaggtggagatcaagaggaccgtggccgcccccagcgtgttcatcttccctcccagcgacgagcagctgaagtctggcaccgccagcgtggtgtgcctgctgaacaacttctacccccgcgaggccaaggtgcagtggaaggtggacaacgccctgcagagcggcaacagccaggagagcgtgaccgagcaggactccaaggacagcacctacagcctgagcagcaccctgaccctgagcaaggccgactacgagaagcacaaggtgtacgcctgcgaggtgacccaccagggactgtctagccccgtgaccaagagcttcaaccggggcgagtgctaa

SEQ ID NO: 427 - protein, 235 aa, Artificial Sequence
  IgG1 light chain
METDTLLLWVLLLWVPGSTGEIVMTQSPATLSVSPGERATLSCRASQSVYSSYLAWYQQKPGQAPRLLIYGTSSRAAGIPARFSGSGSGTEFTLTISSLQSEDFAVYYCQQYYSTPYTFGQGTKVEIKRTVAAPSVFIFPPSDEQLKSGTASVVCLLNNFYPREAKVQWKVDNALQSGNSQESVTEQDSKDSTYSLSSTLTLSKADYEKHKVYACEVTHQGLSSPVTKSFNRGEC

SEQ ID NO: 428 - DNA, 720 bp, Artificial Sequence
  IgG1 light chain
atggagaccgacaccctgctgctctgggtgctgctgctctgggtgcccggctccaccggagacatcgtgatgacccagtcacccctgagtctgcccgtgactcccggcgagcccgcctcaatcagctgcaggagcagccagagcctgctgcacagcaacggctacaactacctggactggtacctgcaaaagcccggacagagtccacagctgcttatctacgccgccagcagcctgcagagcggcgtgcccgacaggttcagcggcagcggtagcggcaccgacttcaccctgaaaatcagcagggtggaggccgaggacgtgggcgtgtactactgtatgcaggccctggagacacctcccacattcggacagggcaccaagctggagatcaagaggaccgtggccgcccccagcgtgttcatcttccctcccagcgacgagcagctgaagtctggcaccgccagcgtggtgtgcctgctgaacaacttctacccccgcgaggccaaggtgcagtggaaggtggacaacgccctgcagagcggcaacagccaggagagcgtgaccgagcaggactccaaggacagcacctacagcctgagcagcaccctgaccctgagcaaggccgactacgagaagcacaaggtgtacgcctgcgaggtgacccaccagggactgtctagccccgtgaccaagagcttcaaccggggcgagtgctaa

SEQ ID NO: 429 - protein, 239 aa, Artificial Sequence
  IgG1 light chain
METDTLLLWVLLLWVPGSTGDIVMTQSPLSLPVTPGEPASISCRSSQSLLHSNGYNYLDWYLQKPGQSPQLLIYAASSLQSGVPDRFSGSGSGTDFTLKISRVEAEDVGVYYCMQALETPPTFGQGTKLEIKRTVAAPSVFIFPPSDEQLKSGTASVVCLLNNFYPREAKVQWKVDNALQSGNSQESVTEQDSKDSTYSLSSTLTLSKADYEKHKVYACEVTHQGLSSPVTKSFNRGEC

SEQ ID NO: 430 - DNA, 720 bp, Artificial Sequence
  IgG1 light chain
atggagaccgacaccctgctgctctgggtgctgctgctctgggtgcccggctccaccggagacatcgtgatgacccagagccccctgagcctgcccgtgacccccggagagcccgccagcatcagctgcaggagcagccagtcactgctgcacagcaacggctacaactacctggactggtacctgcaaaaacccggccaatcaccccagctgctgatctacgccgcctccagcctgcagagcggcgtgcccgacaggttcagtggttcaggcagcggcaccgacttcaccctgaagataagcagggtggaggccgaggacgtgggcgtgtactactgtatgcagggcgcacattggcctcccacattcggccagggcactaaggtggaaatcaagaggaccgtggccgcccccagcgtgttcatcttccctcccagcgacgagcagctgaagtctggcaccgccagcgtggtgtgcctgctgaacaacttctacccccgcgaggccaaggtgcagtggaaggtggacaacgccctgcagagcggcaacagccaggagagcgtgaccgagcaggactccaaggacagcacctacagcctgagcagcaccctgaccctgagcaaggccgactacgagaagcacaaggtgtacgcctgcgaggtgacccaccagggactgtctagccccgtgaccaagagcttcaaccggggcgagtgctaa

SEQ ID NO: 431 - protein, 239 aa, Artificial Sequence
  IgG1 light chain
METDTLLLWVLLLWVPGSTGDIVMTQSPLSLPVTPGEPASISCRSSQSLLHSNGYNYLDWYLQKPGQSPQLLIYAASSLQSGVPDRFSGSGSGTDFTLKISRVEAEDVGVYYCMQGAHWPPTFGQGTKVEIKRTVAAPSVFIFPPSDEQLKSGTASVVCLLNNFYPREAKVQWKVDNALQSGNSQESVTEQDSKDSTYSLSSTLTLSKADYEKHKVYACEVTHQGLSSPVTKSFNRGEC

SEQ ID NO: 432 - DNA, 705 bp, Artificial Sequence; identical to SEQ ID NO: 274
  IgG1 light chain

SEQ ID NO: 433 - protein, 234 aa, Artificial Sequence; identical to SEQ ID NO: 275
  IgG1 light chain

SEQ ID NO: 434 - DNA, 705 bp, Artificial Sequence; identical to SEQ ID NO: 326
  IgG1 light chain

SEQ ID NO: 435 - protein, 234 aa, Artificial Sequence; identical to SEQ ID NO: 327
  IgG1 light chain

SEQ ID NO: 436 - DNA, 705 bp, Artificial Sequence
  IgG1 light chain
atggagaccgacaccctgctgctctgggtgctgctgctctgggtgcccggctccaccggagacatccagatgacccagagccccagctccctgagcgccagcgtgggcgacagggtaaccattacctgccgagccagccagagcatcggcagctggatggcctggtatcaacaaaagcccggcaaggcccccaagctgctgatctacgccgccagcaccctgcagagcggcgtgcccagcaggttcagcggcagtggcagcggcaccgacttcaccctgacaatctcaagtctgcagcccgaggacttcgccacctactactgccagcagagctacaccacccccatcaccttcggccctggaaccaaggtggacatcaagaggaccgtggccgcccccagcgtgttcatcttccctcccagcgacgagcagctgaagtctggcaccgccagcgtggtgtgcctgctgaacaacttctacccccgcgaggccaaggtgcagtggaaggtggacaacgccctgcagagcggcaacagccaggagagcgtgaccgagcaggactccaaggacagcacctacagcctgagcagcaccctgaccctgagcaaggccgactacgagaagcacaaggtgtacgcctgcgaggtgacccaccagggactgtctagccccgtgaccaagagcttcaaccggggcgagtgctaa

SEQ ID NO: 437 - protein, 234 aa, Artificial Sequence
  IgG1 light chain
METDTLLLWVLLLWVPGSTGDIQMTQSPSSLSASVGDRVTITCRASQSIGSWMAWYQQKPGKAPKLLIYAASTLQSGVPSRFSGSGSGTDFTLTISSLQPEDFATYYCQQSYTTPITFGPGTKVDIKRTVAAPSVFIFPPSDEQLKSGTASVVCLLNNFYPREAKVQWKVDNALQSGNSQESVTEQDSKDSTYSLSSTLTLSKADYEKHKVYACEVTHQGLSSPVTKSFNRGEC

SEQ ID NO: 438 - DNA, 705 bp, Artificial Sequence
  IgG1 light chain
atggagaccgacaccctgctgctctgggtgctgctgctctgggtgcccggctccaccggagacatccagatgacccagagcccaagtagcctctcagccagcgtgggcgacagggtgaccattacgtgtagggccagccagaccatctcaacctacctgaactggtatcaacaaaagcccggcaaggcccccaagctgcttatctacgacgccagcaacctggagaccggcgtgcccagcaggttcagcggcagcggctccggcaccgacttcacgctgaccatcagcagcctgcagcccgaggacttcgccacctactactgccagcagagctacagcacccctatcacctttggccagggcaccaaggtggagatcaagaggaccgtggccgcccccagcgtgttcatcttccctcccagcgacgagcagctgaagtctggcaccgccagcgtggtgtgcctgctgaacaacttctacccccgcgaggccaaggtgcagtggaaggtggacaacgccctgcagagcggcaacagccaggagagcgtgaccgagcaggactccaaggacagcacctacagcctgagcagcaccctgaccctgagcaaggccgactacgagaagcacaaggtgtacgcctgcgaggtgacccaccagggactgtctagccccgtgaccaagagcttcaaccggggcgagtgctaa

SEQ ID NO: 439 - protein, 234 aa, Artificial Sequence
  IgG1 light chain
METDTLLLWVLLLWVPGSTGDIQMTQSPSSLSASVGDRVTITCRASQTISTYLNWYQQKPGKAPKLLIYDASNLETGVPSRFSGSGSGTDFTLTISSLQPEDFATYYCQQSYSTPITFGQGTKVEIKRTVAAPSVFIFPPSDEQLKSGTASVVCLLNNFYPREAKVQWKVDNALQSGNSQESVTEQDSKDSTYSLSSTLTLSKADYEKHKVYACEVTHQGLSSPVTKSFNRGEC

SEQ ID NO: 440 - DNA, 702 bp, Artificial Sequence
  IgG1 light chain
atggagaccgacaccctgctgctctgggtgctgctgctctgggtgcccggctccaccggagacatccagatgacccagagcccctccagcctgagcgccagcgtgggcgacagggtgaccatcacctgccaggccacccaggacatcgccgactacctgaactggtatcagcaaaagcccggcaaggcccccaagctgctgatctacaaggcctcaagccttgagagcggcgtgcccagcaggttcagcggcagcggtagcgggaccgacttcactctgaccattagcagcctgcagcccgaggacttcgccacctactactgccagcagagctacagcacccccacctttggccctggaaccaaggtggacatcaagaggaccgtggccgcccccagcgtgttcatcttccctcccagcgacgagcagctgaagtctggcaccgccagcgtggtgtgcctgctgaacaacttctacccccgcgaggccaaggtgcagtggaaggtggacaacgccctgcagagcggcaacagccaggagagcgtgaccgagcaggactccaaggacagcacctacagcctgagcagcaccctgaccctgagcaaggccgactacgagaagcacaaggtgtacgcctgcgaggtgacccaccagggactgtctagccccgtgaccaagagcttcaaccggggcgagtgctaa

SEQ ID NO: 441 - protein, 233 aa, Artificial Sequence
  IgG1 light chain
METDTLLLWVLLLWVPGSTGDIQMTQSPSSLSASVGDRVTITCQATQDIADYLNWYQQKPGKAPKLLIYKASSLESGVPSRFSGSGSGTDFTLTISSLQPEDFATYYCQQSYSTPTFGPGTKVDIKRTVAAPSVFIFPPSDEQLKSGTASVVCLLNNFYPREAKVQWKVDNALQSGNSQESVTEQDSKDSTYSLSSTLTLSKADYEKHKVYACEVTHQGLSSPVTKSFNRGEC

SEQ ID NO: 442 - DNA, 720 bp, Artificial Sequence
  IgG1 light chain
atggagaccgacaccctgctgctctgggtgctgctgctctgggtgcccggctccaccggagacatcgtgatgacccagagtccactgagcctgcccgtgaccccgggagaacccgccagcatcagctgcaggagctcacagagccttctgcatagcaacggctacaactacctcgactggtacctgcagaaacccggacaaagcccccagctgttgatctacctgggcagcaacagggccagcggcgtgcccgacaggttcagcggcagcggaagcggcaccgacttcaccctgaagatcagcagggtggaggccgaggacgtgggcgtgtactactgtatgcaaggcacccactggcccccaaccttcgggggaggaactaaggtggagatcaagaggaccgtggccgcccccagcgtgttcatcttccctcccagcgacgagcagctgaagtctggcaccgccagcgtggtgtgcctgctgaacaacttctacccccgcgaggccaaggtgcagtggaaggtggacaacgccctgcagagcggcaacagccaggagagcgtgaccgagcaggactccaaggacagcacctacagcctgagcagcaccctgaccctgagcaaggccgactacgagaagcacaaggtgtacgcctgcgaggtgacccaccagggactgtctagccccgtgaccaagagcttcaaccggggcgagtgctaa

SEQ ID NO: 443 - protein, 239 aa, Artificial Sequence
  IgG1 light chain
METDTLLLWVLLLWVPGSTGDIVMTQSPLSLPVTPGEPASISCRSSQSLLHSNGYNYLDWYLQKPGQSPQLLIYLGSNRASGVPDRFSGSGSGTDFTLKISRVEAEDVGVYYCMQGTHWPPTFGGGTKVEIKRTVAAPSVFIFPPSDEQLKSGTASVVCLLNNFYPREAKVQWKVDNALQSGNSQESVTEQDSKDSTYSLSSTLTLSKADYEKHKVYACEVTHQGLSSPVTKSFNRGEC

SEQ ID NO: 444 - DNA, 705 bp, Artificial Sequence
  IgG1 light chain
atggagaccgacaccctgctgctctgggtgctgctgctctgggtgcccggctccaccggagacatccagatgacccagagcccaagcagcctgagcgccagcgtgggcgacagggtgaccatcacctgccgagcgagccagagcatcagcaactggctggcctggtatcagcagaagcccggcaaggcccccaagctgcttatctacgacggcagcaacctgggcaccggcgtacccagcaggttcagcggcagtggcagcggcactgacttcaccttgaccattagcagtctgcagcccgaggacttcgccacctactactgcttgcaggactttacctaccccctgaccttcggcggagggaccaaagtggaaatcaagaggaccgtggccgcccccagcgtgttcatcttccctcccagcgacgagcagctgaagtctggcaccgccagcgtggtgtgcctgctgaacaacttctacccccgcgaggccaaggtgcagtggaaggtggacaacgccctgcagagcggcaacagccaggagagcgtgaccgagcaggactccaaggacagcacctacagcctgagcagcaccctgaccctgagcaaggccgactacgagaagcacaaggtgtacgcctgcgaggtgacccaccagggactgtctagccccgtgaccaagagcttcaaccggggcgagtgctaa

SEQ ID NO: 445 - protein, 234 aa, Artificial Sequence
  IgG1 light chain
METDTLLLWVLLLWVPGSTGDIQMTQSPSSLSASVGDRVTITCRASQSISNWLAWYQQKPGKAPKLLIYDGSNLGTGVPSRFSGSGSGTDFTLTISSLQPEDFATYYCLQDFTYPLTFGGGTKVEIKRTVAAPSVFIFPPSDEQLKSGTASVVCLLNNFYPREAKVQWKVDNALQSGNSQESVTEQDSKDSTYSLSSTLTLSKADYEKHKVYACEVTHQGLSSPVTKSFNRGEC

SEQ ID NO: 446 - DNA, 705 bp, Artificial Sequence
  IgG1 light chain
atggagaccgacaccctgctgctctgggtgctgctgctctgggtgcccggctccaccggagacatccagatgacccagagccccagctccctgagcgccagcgtgggcgacagggtgaccatcacctgccgagccagccagagcatcagcagctacctgaattggtatcagcaaaagcccggcaaggcccccaagctgttgatctacgacgcaagcagcctgcagagcggcgtgcccagcaggttcagcggcagtggcagcggcaccgacttcaccctcaccatcagctctctgcaacccgaggacttcgccacctactactgccagcaaacttaccataccccctggaccttcggccagggcaccaaggtggagatcaagaggaccgtggccgcccccagcgtgttcatcttccctcccagcgacgagcagctgaagtctggcaccgccagcgtggtgtgcctgctgaacaacttctacccccgcgaggccaaggtgcagtggaaggtggacaacgccctgcagagcggcaacagccaggagagcgtgaccgagcaggactccaaggacagcacctacagcctgagcagcaccctgaccctgagcaaggccgactacgagaagcacaaggtgtacgcctgcgaggtgacccaccagggactgtctagccccgtgaccaagagcttcaaccggggcgagtgctaa

SEQ ID NO: 447 - protein, 234 aa, Artificial Sequence
  IgG1 light chain
METDTLLLWVLLLWVPGSTGDIQMTQSPSSLSASVGDRVTITCRASQSISSYLNWYQQKPGKAPKLLIYDASSLQSGVPSRFSGSGSGTDFTLTISSLQPEDFATYYCQQTYHTPWTFGQGTKVEIKRTVAAPSVFIFPPSDEQLKSGTASVVCLLNNFYPREAKVQWKVDNALQSGNSQESVTEQDSKDSTYSLSSTLTLSKADYEKHKVYACEVTHQGLSSPVTKSFNRGEC

SEQ ID NO: 448 - DNA, 705 bp, Artificial Sequence
  IgG1 light chain
atggagaccgacaccctgctgctctgggtgctgctgctctgggtgcccggctccaccggagacatccagatgacccagagccccagctccctgagcgccagcgtgggcgacagggtgaccatcacctgtagggcctcacagagcgtgagcagctggctggcctggtatcaacagaagcccggcaaggcccccaagctgctgatttacgccgccagcaatttgcagagtggcgtgcccagcaggttcagcggcagcggaagcggcaccgacttcaccctcaccatcagctcactgcagcccgaggacttcgccacctactactgtcagcaaagctacgacgtcccctggaccttcggccagggcactaggctggagatcaagaggaccgtggccgcccccagcgtgttcatcttccctcccagcgacgagcagctgaagtctggcaccgccagcgtggtgtgcctgctgaacaacttctacccccgcgaggccaaggtgcagtggaaggtggacaacgccctgcagagcggcaacagccaggagagcgtgaccgagcaggactccaaggacagcacctacagcctgagcagcaccctgaccctgagcaaggccgactacgagaagcacaaggtgtacgcctgcgaggtgacccaccagggactgtctagccccgtgaccaagagcttcaaccggggcgagtgctaa

SEQ ID NO: 449 - protein, 234 aa, Artificial Sequence
  IgG1 light chain
METDTLLLWVLLLWVPGSTGDIQMTQSPSSLSASVGDRVTITCRASQSVSSWLAWYQQKPGKAPKLLIYAASNLQSGVPSRFSGSGSGTDFTLTISSLQPEDFATYYCQQSYDVPWTFGQGTRLEIKRTVAAPSVFIFPPSDEQLKSGTASVVCLLNNFYPREAKVQWKVDNALQSGNSQESVTEQDSKDSTYSLSSTLTLSKADYEKHKVYACEVTHQGLSSPVTKSFNRGEC

SEQ ID NO: 450 - DNA, 708 bp, Artificial Sequence
  IgG1 light chain
atggagaccgacaccctgctgctctgggtgctgctgctctgggtgcccggctccaccggagagatcgtgatgacccagagtcccgctaccctgagcgtgagccccggtgagagggccacccttagctgcagggccagccagggtatccccagcaacagcctggcgtggtatcaacagaagcccggacaggcccccaggttgctgatatacggcaccagcgccagggctagcggcatccccgccaggttcagcgggagcggcagcggcaccgagttcaccctgaccatcagcagcctgcagagcgaggacttcgccgtgtactactgccagcagtactacagcaccccctggaccttcggccaaggaaccaaggtggagatcaagaggaccgtggccgcccccagcgtgttcatcttccctcccagcgacgagcagctgaagtctggcaccgccagcgtggtgtgcctgctgaacaacttctacccccgcgaggccaaggtgcagtggaaggtggacaacgccctgcagagcggcaacagccaggagagcgtgaccgagcaggactccaaggacagcacctacagcctgagcagcaccctgaccctgagcaaggccgactacgagaagcacaaggtgtacgcctgcgaggtgacccaccagggactgtctagccccgtgaccaagagcttcaaccggggcgagtgctaa

SEQ ID NO: 451 - protein, 235 aa, Artificial Sequence
  IgG1 light chain
METDTLLLWVLLLWVPGSTGEIVMTQSPATLSVSPGERATLSCRASQGIPSNSLAWYQQKPGQAPRLLIYGTSARASGIPARFSGSGSGTEFTLTISSLQSEDFAVYYCQQYYSTPWTFGQGTKVEIKRTVAAPSVFIFPPSDEQLKSGTASVVCLLNNFYPREAKVQWKVDNALQSGNSQESVTEQDSKDSTYSLSSTLTLSKADYEKHKVYACEVTHQGLSSPVTKSFNRGEC

SEQ ID NO: 452 - DNA, 705 bp, Artificial Sequence
  IgG1 light chain
atggagaccgacaccctgctgctctgggtgctgctgctctgggtgcccggctccaccggagacatccagatgacccagagccccagcagcctgagcgccagcgtgggcgacagggtgaccataacctgccaggccagccaggacatcagcaactacctgaactggtatcaacagaagcccggcaaggcccccaagctgctgatctacgacgccagcaaccttcaagctggggtgccgagcaggttcagcggaagcggcagcggcaccgacttcactctgaccatcagtagcctccagcccgaggacttcgccacctactactgccaacaaagctatagtagcccaatcacctttggccagggcaccaggttggagatcaagaggaccgtggccgcccccagcgtgttcatcttccctcccagcgacgagcagctgaagtctggcaccgccagcgtggtgtgcctgctgaacaacttctacccccgcgaggccaaggtgcagtggaaggtggacaacgccctgcagagcggcaacagccaggagagcgtgaccgagcaggactccaaggacagcacctacagcctgagcagcaccctgaccctgagcaaggccgactacgagaagcacaaggtgtacgcctgcgaggtgacccaccagggactgtctagccccgtgaccaagagcttcaaccggggcgagtgctaa

SEQ ID NO: 453 - protein, 234 aa, Artificial Sequence
  IgG1 light chain
METDTLLLWVLLLWVPGSTGDIQMTQSPSSLSASVGDRVTITCQASQDISNYLNWYQQKPGKAPKLLIYDASNLQAGVPSRFSGSGSGTDFTLTISSLQPEDFATYYCQQSYSSPITFGQGTRLEIKRTVAAPSVFIFPPSDEQLKSGTASVVCLLNNFYPREAKVQWKVDNALQSGNSQESVTEQDSKDSTYSLSSTLTLSKADYEKHKVYACEVTHQGLSSPVTKSFNRGEC

SEQ ID NO: 454 - DNA, 705 bp, Artificial Sequence
  IgG1 light chain
atggagaccgacaccctgctgctctgggtgctgctgctctgggtgcccggctccaccggagacatccagatgacccagagccccagctccctgagcgccagcgtgggcgacagggtgaccatcacctgtagggccagccagggcatcagcaacaacctgaactggtatcaacagaagcccggcaaggcccccaagctgctgatctacgccgcctcaagcctgcagagcggcgtgcccagccgattcagcggaagcggcagcgggaccgacttcactctgaccattagcagtctgcagcccgaggacttcgccacctactactgccagcagggcttcaacttccccctgactttcggaggcggaactaaggtggagatcaagaggaccgtggccgcccccagcgtgttcatcttccctcccagcgacgagcagctgaagtctggcaccgccagcgtggtgtgcctgctgaacaacttctacccccgcgaggccaaggtgcagtggaaggtggacaacgccctgcagagcggcaacagccaggagagcgtgaccgagcaggactccaaggacagcacctacagcctgagcagcaccctgaccctgagcaaggccgactacgagaagcacaaggtgtacgcctgcgaggtgacccaccagggactgtctagccccgtgaccaagagcttcaaccggggcgagtgctaa

SEQ ID NO: 455 - protein, 234 aa, Artificial Sequence
  IgG1 light chain
METDTLLLWVLLLWVPGSTGDIQMTQSPSSLSASVGDRVTITCRASQGISNNLNWYQQKPGKAPKLLIYAASSLQSGVPSRFSGSGSGTDFTLTISSLQPEDFATYYCQQGFNFPLTFGGGTKVEIKRTVAAPSVFIFPPSDEQLKSGTASVVCLLNNFYPREAKVQWKVDNALQSGNSQESVTEQDSKDSTYSLSSTLTLSKADYEKHKVYACEVTHQGLSSPVTKSFNRGEC

SEQ ID NO: 456 - DNA, 723 bp, Artificial Sequence
  IgG1 light chain
atggagaccgacaccctgctgctctgggtgctgctgctctgggtgcccggctccaccggagacatcgtgatgacccagagccccgatagcctggctgtgagcctgggcgagagggccaccatcaactgcaagagcagccagagcgtgctttacagcagcaacaacaggaactacctggcctggtatcagcagaagcccggtcaacctcccaagctgctcatctactgggccagcaccagggagagcggcgtgccggacaggttcagcggcagcgggagcggcaccgacttcaccctgaccatcagctcactccaggccgaggacgtggccgtgtactactgtcagcagtactacagcgtgcccttgaccttcggccagggcaccaaggtggagatcaagaggaccgtggccgcccccagcgtgttcatcttccctcccagcgacgagcagctgaagtctggcaccgccagcgtggtgtgcctgctgaacaacttctacccccgcgaggccaaggtgcagtggaaggtggacaacgccctgcagagcggcaacagccaggagagcgtgaccgagcaggactccaaggacagcacctacagcctgagcagcaccctgaccctgagcaaggccgactacgagaagcacaaggtgtacgcctgcgaggtgacccaccagggactgtctagccccgtgaccaagagcttcaaccggggcgagtgctaa

SEQ ID NO: 457 - protein, 240 aa, Artificial Sequence
  IgG1 light chain
METDTLLLWVLLLWVPGSTGDIVMTQSPDSLAVSLGERATINCKSSQSVLYSSNNRNYLAWYQQKPGQPPKLLIYWASTRESGVPDRFSGSGSGTDFTLTISSLQAEDVAVYYCQQYYSVPLTFGQGTKVEIKRTVAAPSVFIFPPSDEQLKSGTASVVCLLNNFYPREAKVQWKVDNALQSGNSQESVTEQDSKDSTYSLSSTLTLSKADYEKHKVYACEVTHQGLSSPVTKSFNRGEC

SEQ ID NO: 458 - protein, 8 aa, Artificial Sequence
  CDR
GGTFSSYA

SEQ ID NO: 459 - protein, 8 aa, Artificial Sequence
  CDR
IIPIFGTA

SEQ ID NO: 460 - protein, 16 aa, Artificial Sequence
  CDR
AKSILGGRIFGGYFDL

SEQ ID NO: 461 - protein, 11 aa, Artificial Sequence
  CDR
QSLLHSNGYNY

SEQ ID NO: 462 - protein, 3 aa, Artificial Sequence
  CDR
AAS

SEQ ID NO: 463 - protein, 9 aa, Artificial Sequence
  CDR
MQALQTPPT

SEQ ID NO: 464 - protein, 8 aa, Artificial Sequence
  CDR
GYTFSDYY

SEQ ID NO: 465 - protein, 8 aa, Artificial Sequence
  CDR
IIPIVGTA

SEQ ID NO: 466 - protein, 15 aa, Artificial Sequence
  CDR
ARAGGGDYKSYYFDY

SEQ ID NO: 467 - protein, 12 aa, Artificial Sequence
  CDR
QSVLYSSNNKNY

SEQ ID NO: 468 - protein, 3 aa, Artificial Sequence
  CDR
WAS

SEQ ID NO: 469 - protein, 8 aa, Artificial Sequence
  CDR
QQYYTSPT

SEQ ID NO: 470 - protein, 8 aa, Artificial Sequence
  CDR
GGTFSSYA

SEQ ID NO: 471 - protein, 8 aa, Artificial Sequence
  CDR
IIPIFGTP

SEQ ID NO: 472 - protein, 14 aa, Artificial Sequence
  CDR
ARVRAKRPNWYFDL

SEQ ID NO: 473 - protein, 11 aa, Artificial Sequence
  CDR
QSLLHSNGYNY

SEQ ID NO: 474 - protein, 3 aa, Artificial Sequence
  CDR
LGS

SEQ ID NO: 475 - protein, 9 aa, Artificial Sequence
  CDR
MQSIQIPPT

SEQ ID NO: 476 - protein, 8 aa, Artificial Sequence
  CDR
GGTFSTFG

SEQ ID NO: 477 - protein, 8 aa, Artificial Sequence
  CDR
IIPILATT

SEQ ID NO: 478 - protein, 17 aa, Artificial Sequence
  CDR
ASGDYYDSSGYYGYFQH

SEQ ID NO: 479 - protein, 7 aa, Artificial Sequence
  CDR
QSVSSSY

SEQ ID NO: 480 - protein, 3 aa, Artificial Sequence
  CDR
GAS

SEQ ID NO: 481 - protein, 9 aa, Artificial Sequence
  CDR
QQSYSIPFT

SEQ ID NO: 482 - protein, 8 aa, Artificial Sequence
  CDR
GFTFSSYW

SEQ ID NO: 483 - protein, 8 aa, Artificial Sequence
  CDR
ISSDTTYK

SEQ ID NO: 484 - protein, 10 aa, Artificial Sequence
  CDR
AREVDTAMKN

SEQ ID NO: 485 - protein, 6 aa, Artificial Sequence
  CDR
QGIGND

SEQ ID NO: 486 - protein, 3 aa, Artificial Sequence
  CDR
AAS

SEQ ID NO: 487 - protein, 9 aa, Artificial Sequence
  CDR
QQSYSTPYT

SEQ ID NO: 488 - protein, 8 aa, Artificial Sequence
  CDR
GFTFSSYW

SEQ ID NO: 489 - protein, 8 aa, Artificial Sequence
  CDR
IGGSGAGT

SEQ ID NO: 490 - protein, 12 aa, Artificial Sequence
  CDR
ARLSTVTRGFDY

SEQ ID NO: 491 - protein, 6 aa, Artificial Sequence
  CDR
QSISNW

SEQ ID NO: 492 - protein, 3 aa, Artificial Sequence
  CDR
SAS

SEQ ID NO: 493 - protein, 9 aa, Artificial Sequence
  CDR
QQSYSTPPT

SEQ ID NO: 494 - protein, 8 aa, Artificial Sequence
  CDR
GYTFTDSY

SEQ ID NO: 495 - protein, 8 aa, Artificial Sequence
  CDR
MNPNSGNT

SEQ ID NO: 496 - protein, 19 aa, Artificial Sequence
  CDR
ARGVFDYGDYGYYYHYMDV

SEQ ID NO: 497 - protein, 11 aa, Artificial Sequence
  CDR
QSLLHSNGYNY

SEQ ID NO: 498 - protein, 3 aa, Artificial Sequence
  CDR
GAS

SEQ ID NO: 499 - protein, 8 aa, Artificial Sequence
  CDR
MQGTQWPT

SEQ ID NO: 500 - protein, 8 aa, Artificial Sequence
  CDR
GGTFSSYA

SEQ ID NO: 501 - protein, 8 aa, Artificial Sequence
  CDR
ISPDNGNT

SEQ ID NO: 502 - protein, 17 aa, Artificial Sequence
  CDR
ARLAYDTGYYYYYYMDV

SEQ ID NO: 503 - protein, 11 aa, Artificial Sequence
  CDR
QSLLHSNGYNY

SEQ ID NO: 504 - protein, 3 aa, Artificial Sequence
  CDR
AAS

SEQ ID NO: 505 - protein, 9 aa, Artificial Sequence
  CDR
MQGTHWPLT

SEQ ID NO: 506 - protein, 8 aa, Artificial Sequence
  CDR
GFAFSSHW

SEQ ID NO: 507 - protein, 8 aa, Artificial Sequence
  CDR
ISSGSHSI

SEQ ID NO: 508 - protein, 15 aa, Artificial Sequence
  CDR
AREAGTSYYYYGMDV

SEQ ID NO: 509 - protein, 6 aa, Artificial Sequence
  CDR
QDIRNY

SEQ ID NO: 510 - protein, 3 aa, Artificial Sequence
  CDR
KAS

SEQ ID NO: 511 - protein, 9 aa, Artificial Sequence
  CDR
QQSYSTPPT

SEQ ID NO: 512 - protein, 8 aa, Artificial Sequence
  CDR
GGTFGYYA

SEQ ID NO: 513 - protein, 8 aa, Artificial Sequence
  CDR
IIPMVGTG

SEQ ID NO: 514 - protein, 14 aa, Artificial Sequence
  CDR
AGVEVGATRGYFQH

SEQ ID NO: 515 - protein, 11 aa, Artificial Sequence
  CDR
QSLLHSNGYNY

SEQ ID NO: 516 - protein, 3 aa, Artificial Sequence
  CDR
AAS

SEQ ID NO: 517 - protein, 9 aa, Artificial Sequence
  CDR
MQGTHWPTT

SEQ ID NO: 518 - protein, 8 aa, Artificial Sequence
  CDR
GGTFSSYA

SEQ ID NO: 519 - protein, 8 aa, Artificial Sequence
  CDR
INPNSGGT

SEQ ID NO: 520 - protein, 12 aa, Artificial Sequence
  CDR
AMDTNYYYGMDV

SEQ ID NO: 521 - protein, 6 aa, Artificial Sequence
  CDR
EDIANN

SEQ ID NO: 522 - protein, 3 aa, Artificial Sequence
  CDR
AAS

SEQ ID NO: 523 - protein, 9 aa, Artificial Sequence
  CDR
QQGYNIPFT

SEQ ID NO: 524 - protein, 8 aa, Artificial Sequence
  CDR
GYTFTGYY

SEQ ID NO: 525 - protein, 8 aa, Artificial Sequence
  CDR
IDPSGGGT

SEQ ID NO: 526 - protein, 20 aa, Artificial Sequence
  CDR
AKDIVVVPAAIANYYYGMDV

SEQ ID NO: 527 - protein, 6 aa, Artificial Sequence
  CDR
QGISNY

SEQ ID NO: 528 - protein, 3 aa, Artificial Sequence
  CDR
GAS

SEQ ID NO: 529 - protein, 9 aa, Artificial Sequence
  CDR
QQSYSTPWT

SEQ ID NO: 530 - protein, 8 aa, Artificial Sequence
  CDR
GYTFTDYY

SEQ ID NO: 531 - protein, 8 aa, Artificial Sequence
  CDR
IMPLFGTI

SEQ ID NO: 532 - protein, 10 aa, Artificial Sequence
  CDR
ARGRVGATDY

SEQ ID NO: 533 - protein, 11 aa, Artificial Sequence
  CDR
QSLLHSNGYNY

SEQ ID NO: 534 - protein, 3 aa, Artificial Sequence
  CDR
LAS

SEQ ID NO: 535 - protein, 9 aa, Artificial Sequence
  CDR
MQALQTPVT

SEQ ID NO: 536 - protein, 8 aa, Artificial Sequence
  CDR
GYTFTSYG

SEQ ID NO: 537 - protein, 8 aa, Artificial Sequence
  CDR
IIPIFGTA

SEQ ID NO: 538 - protein, 9 aa, Artificial Sequence
  CDR
ARDTVSMDV

SEQ ID NO: 539 - protein, 11 aa, Artificial Sequence
  CDR
QSLLHSNGYNY

SEQ ID NO: 540 - protein, 3 aa, Artificial Sequence
  CDR
DAS

SEQ ID NO: 541 - protein, 9 aa, Artificial Sequence
  CDR
MQGAHWPPT

SEQ ID NO: 542 - protein, 8 aa, Artificial Sequence
  CDR
GGTFSSYA

SEQ ID NO: 543 - protein, 8 aa, Artificial Sequence
  CDR
IIPMFGTT

SEQ ID NO: 544 - protein, 14 aa, Artificial Sequence
  CDR
ATVAAAGPNWYFDL

SEQ ID NO: 545 - protein, 6 aa, Artificial Sequence
  CDR
QGISNY

SEQ ID NO: 546 - protein, 3 aa, Artificial Sequence
  CDR
AAS

SEQ ID NO: 547 - protein, 9 aa, Artificial Sequence
  CDR
QQSYSTPPT

SEQ ID NO: 548 - protein, 8 aa, Artificial Sequence
  CDR
GYTFTSHY

SEQ ID NO: 549 - protein, 8 aa, Artificial Sequence
  CDR
INPSGGST

SEQ ID NO: 550 - protein, 21 aa, Artificial Sequence
  CDR
ARAGIGYLAAHDLYYYYGMDV

SEQ ID NO: 551 - protein, 6 aa, Artificial Sequence
  CDR
QSVSSN

SEQ ID NO: 552 - protein, 3 aa, Artificial Sequence
  CDR
GAS

SEQ ID NO: 553 - protein, 9 aa, Artificial Sequence
  CDR
QQYYSTPYT

SEQ ID NO: 554 - protein, 8 aa, Artificial Sequence
  CDR
GYTFTDSF

SEQ ID NO: 555 - protein, 8 aa, Artificial Sequence
  CDR
INPGTGAT

SEQ ID NO: 556 - protein, 11 aa, Artificial Sequence
  CDR
ARSSDYDSSDY

SEQ ID NO: 557 - protein, 6 aa, Artificial Sequence
  CDR
QSISTW

SEQ ID NO: 558 - protein, 3 aa, Artificial Sequence
  CDR
GAS

SEQ ID NO: 559 - protein, 9 aa, Artificial Sequence
  CDR
QQSYNSPYT

SEQ ID NO: 560 - protein, 8 aa, Artificial Sequence
  CDR
GYTFTSFG

SEQ ID NO: 561 - protein, 8 aa, Artificial Sequence
  CDR
IIPTLGTA

SEQ ID NO: 562 - protein, 16 aa, Artificial Sequence
  CDR
AGGAAAGPDKYYGMDV

SEQ ID NO: 563 - protein, 6 aa, Artificial Sequence
  CDR
QSISSY

SEQ ID NO: 564 - protein, 3 aa, Artificial Sequence
  CDR
AAS

SEQ ID NO: 565 - protein, 9 aa, Artificial Sequence
  CDR
QQSYSTPLT

SEQ ID NO: 566 - protein, 8 aa, Artificial Sequence
  CDR
GFSFSHAW

SEQ ID NO: 567 - protein, 7 aa, Artificial Sequence
  CDR
IHSGGST

SEQ ID NO: 568 - protein, 11 aa, Artificial Sequence
  CDR
ARIGKGGGFDY

SEQ ID NO: 569 - protein, 6 aa, Artificial Sequence
  CDR
QDIGSW

SEQ ID NO: 570 - protein, 3 aa, Artificial Sequence
  CDR
AAS

SEQ ID NO: 571 - protein, 9 aa, Artificial Sequence
  CDR
QQSYSTPPT

SEQ ID NO: 572 - protein, 8 aa, Artificial Sequence
  CDR
GGTFSSYA

SEQ ID NO: 573 - protein, 8 aa, Artificial Sequence
  CDR
IIPIFGTA

SEQ ID NO: 574 - protein, 17 aa, Artificial Sequence
  CDR
ASGFYSNDLYYYYYMDV

SEQ ID NO: 575 - protein, 6 aa, Artificial Sequence
  CDR
QSISSW

SEQ ID NO: 576 - protein, 3 aa, Artificial Sequence
  CDR
DAS

SEQ ID NO: 577 - protein, 9 aa, Artificial Sequence
  CDR
QQTYAIPLT

SEQ ID NO: 578 - protein, 8 aa, Artificial Sequence
  CDR
GYTFSNHY

SEQ ID NO: 579 - protein, 8 aa, Artificial Sequence
  CDR
VNPTSGNT

SEQ ID NO: 580 - protein, 11 aa, Artificial Sequence
  CDR
ARDLGVTYFDL

SEQ ID NO: 581 - protein, 6 aa, Artificial Sequence
  CDR
QGISSW

SEQ ID NO: 582 - protein, 3 aa, Artificial Sequence
  CDR
EAS

SEQ ID NO: 583 - protein, 9 aa, Artificial Sequence
  CDR
LQDYNYPLT

SEQ ID NO: 584 - protein, 8 aa, Artificial Sequence
  CDR
GFKFRTFW

SEQ ID NO: 585 - protein, 8 aa, Artificial Sequence
  CDR
ISNGGDAT

SEQ ID NO: 586 - protein, 14 aa, Artificial Sequence
  CDR
ARVDCSGGSCYLGY

SEQ ID NO: 587 - protein, 6 aa, Artificial Sequence
  CDR
ESIGRY

SEQ ID NO: 588 - protein, 3 aa, Artificial Sequence
  CDR
GTS

SEQ ID NO: 589 - protein, 9 aa, Artificial Sequence
  CDR
QQSYSTPPT

SEQ ID NO: 590 - protein, 8 aa, Artificial Sequence
  CDR
GFTFSSYW

SEQ ID NO: 591 - protein, 8 aa, Artificial Sequence
  CDR
ISSRSSYI

SEQ ID NO: 592 - protein, 9 aa, Artificial Sequence
  CDR
AREGNGMDV

SEQ ID NO: 593 - protein, 6 aa, Artificial Sequence
  CDR
QDIGSY

SEQ ID NO: 594 - protein, 3 aa, Artificial Sequence
  CDR
AAS

SEQ ID NO: 595 - protein, 9 aa, Artificial Sequence
  CDR
LQSYSTPFT

SEQ ID NO: 596 - protein, 8 aa, Artificial Sequence
  CDR
GGTFSSYA

SEQ ID NO: 597 - protein, 8 aa, Artificial Sequence
  CDR
IIPIFGTA

SEQ ID NO: 598 - protein, 14 aa, Artificial Sequence
  CDR
AKTPLGRGYGLFDY

SEQ ID NO: 599 - protein, 11 aa, Artificial Sequence
  CDR
QSLLHSNGYNY

SEQ ID NO: 600 - protein, 3 aa, Artificial Sequence
  CDR
LAS

SEQ ID NO: 601 - protein, 9 aa, Artificial Sequence
  CDR
MQALQTPPT

SEQ ID NO: 602 - protein, 8 aa, Artificial Sequence
  CDR
GGTFSNYA

SEQ ID NO: 603 - protein, 8 aa, Artificial Sequence
  CDR
ISAYNGNT

SEQ ID NO: 604 - protein, 9 aa, Artificial Sequence
  CDR
ARSTNALDY

SEQ ID NO: 605 - protein, 6 aa, Artificial Sequence
  CDR
QGIRSN

SEQ ID NO: 606 - protein, 3 aa, Artificial Sequence
  CDR
IVS

SEQ ID NO: 607 - protein, 9 aa, Artificial Sequence
  CDR
LQHNSNPPT

SEQ ID NO: 608 - protein, 8 aa, Artificial Sequence
  CDR
GYTFSDYY

SEQ ID NO: 609 - protein, 8 aa, Artificial Sequence
  CDR
ILPVFGTA

SEQ ID NO: 610 - protein, 9 aa, Artificial Sequence
  CDR
ARGFGYFDY

SEQ ID NO: 611 - protein, 12 aa, Artificial Sequence
  CDR
QSVFYSSINKNS

SEQ ID NO: 612 - protein, 3 aa, Artificial Sequence
  CDR
WAS

SEQ ID NO: 613 - protein, 9 aa, Artificial Sequence
  CDR
QQYYSTPLT

SEQ ID NO: 614 - protein, 8 aa, Artificial Sequence
  CDR
GYTFTGQY

SEQ ID NO: 615 - protein, 8 aa, Artificial Sequence
  CDR
INPSGGST

SEQ ID NO: 616 - protein, 14 aa, Artificial Sequence
  CDR
AGSYYPYYYYGMDV

SEQ ID NO: 617 - protein, 6 aa, Artificial Sequence
  CDR
QNIGYF

SEQ ID NO: 618 - protein, 3 aa, Artificial Sequence
  CDR
AAS

SEQ ID NO: 619 - protein, 9 aa, Artificial Sequence
  CDR
QQSYSPPLT

SEQ ID NO: 620 - protein, 8 aa, Artificial Sequence
  CDR
GGTFGNYG

SEQ ID NO: 621 - protein, 8 aa, Artificial Sequence
  CDR
IIPVFGTT

SEQ ID NO: 622 - protein, 12 aa, Artificial Sequence
  CDR
ARGLRYYYGMDV

SEQ ID NO: 623 - protein, 11 aa, Artificial Sequence
  CDR
QSLLHSNGYNY

SEQ ID NO: 624 - protein, 3 aa, Artificial Sequence
  CDR
GAS

SEQ ID NO: 625 - protein, 9 aa, Artificial Sequence
  CDR
MQALQNPLT

SEQ ID NO: 626 - protein, 8 aa, Artificial Sequence
  CDR
GGTFTGYF

SEQ ID NO: 627 - protein, 8 aa, Artificial Sequence
  CDR
MNPNSGNT

SEQ ID NO: 628 - protein, 12 aa, Artificial Sequence
  CDR
AREGQGVVPVDY

SEQ ID NO: 629 - protein, 6 aa, Artificial Sequence
  CDR
QSISSW

SEQ ID NO: 630 - protein, 3 aa, Artificial Sequence
  CDR
DAT

SEQ ID NO: 631 - protein, 9 aa, Artificial Sequence
  CDR
LQDYNYPLT

SEQ ID NO: 632 - protein, 8 aa, Artificial Sequence
  CDR
GYTFTTYG

SEQ ID NO: 633 - protein, 8 aa, Artificial Sequence
  CDR
IIPIFGTA

SEQ ID NO: 634 - protein, 20 aa, Artificial Sequence
  CDR
AKLSGSSGSWDYYYYYGMDV

SEQ ID NO: 635 - protein, 11 aa, Artificial Sequence
  CDR
QSLLHSNGYNY

SEQ ID NO: 636 - protein, 3 aa, Artificial Sequence
  CDR
AAS

SEQ ID NO: 637 - protein, 9 aa, Artificial Sequence
  CDR
MQALQTPIT

SEQ ID NO: 638 - protein, 8 aa, Artificial Sequence
  CDR
GGTFSTYA

SEQ ID NO: 639 - protein, 8 aa, Artificial Sequence
  CDR
IIPMFGTA

SEQ ID NO: 640 - protein, 11 aa, Artificial Sequence
  CDR
AGERGYGSLDY

SEQ ID NO: 641 - protein, 6 aa, Artificial Sequence
  CDR
QGIGSW

SEQ ID NO: 642 - protein, 3 aa, Artificial Sequence
  CDR
AAS

SEQ ID NO: 643 - protein, 9 aa, Artificial Sequence
  CDR
QQSYTFPYT

SEQ ID NO: 644 - protein, 8 aa, Artificial Sequence
  CDR
GFTFSNSD

SEQ ID NO: 645 - protein, 8 aa, Artificial Sequence
  CDR
ISSSSGYT

SEQ ID NO: 646 - protein, 13 aa, Artificial Sequence
  CDR
ARANNNWNFYFDY

SEQ ID NO: 647 - protein, 6 aa, Artificial Sequence
  CDR
QSINNW

SEQ ID NO: 648 - protein, 3 aa, Artificial Sequence
  CDR
SAS

SEQ ID NO: 649 - protein, 9 aa, Artificial Sequence
  CDR
QQSYDTPIT

SEQ ID NO: 650 - protein, 8 aa, Artificial Sequence
  CDR
GDTFDTYA

SEQ ID NO: 651 - protein, 8 aa, Artificial Sequence
  CDR
IIPIFGTA

SEQ ID NO: 652 - protein, 17 aa, Artificial Sequence
  CDR
ARSRGRGYSYGSGLFDY

SEQ ID NO: 653 - protein, 11 aa, Artificial Sequence
  CDR
ESLLITNGFNY

SEQ ID NO: 654 - protein, 3 aa, Artificial Sequence
  CDR
LGS

SEQ ID NO: 655 - protein, 9 aa, Artificial Sequence
  CDR
MQALQTPIT

SEQ ID NO: 656 - protein, 8 aa, Artificial Sequence
  CDR
GQTFTDYA

SEQ ID NO: 657 - protein, 8 aa, Artificial Sequence
  CDR
MNPNSGNT

SEQ ID NO: 658 - protein, 13 aa, Artificial Sequence
  CDR
ARETLEQQLPFDY

SEQ ID NO: 659 - protein, 6 aa, Artificial Sequence
  CDR
QSISSW

SEQ ID NO: 660 - protein, 3 aa, Artificial Sequence
  CDR
AAS

SEQ ID NO: 661 - protein, 9 aa, Artificial Sequence
  CDR
QQYYSTLYT

SEQ ID NO: 662 - protein, 8 aa, Artificial Sequence
  CDR
AYTFTSYG

SEQ ID NO: 663 - protein, 8 aa, Artificial Sequence
  CDR
INPNSGNT

SEQ ID NO: 664 - protein, 9 aa, Artificial Sequence
  CDR
ARGGSGWPT

SEQ ID NO: 665 - protein, 6 aa, Artificial Sequence
  CDR
QDISNY

SEQ ID NO: 666 - protein, 3 aa, Artificial Sequence
  CDR
GAS

SEQ ID NO: 667 - protein, 9 aa, Artificial Sequence
  CDR
QQANTFPFT

SEQ ID NO: 668 - protein, 8 aa, Artificial Sequence
  CDR
GYTFTSYG

SEQ ID NO: 669 - protein, 8 aa, Artificial Sequence
  CDR
IDPNSGGT

SEQ ID NO: 670 - protein, 12 aa, Artificial Sequence
  CDR
ARDDWFSGDLDY

SEQ ID NO: 671 - protein, 6 aa, Artificial Sequence
  CDR
QGIDSW

SEQ ID NO: 672 - protein, 3 aa, Artificial Sequence
  CDR
AAS

SEQ ID NO: 673 - protein, 9 aa, Artificial Sequence
  CDR
QQGYSTPIT

SEQ ID NO: 674 - protein, 8 aa, Artificial Sequence
  CDR
GFTFTDAW

SEQ ID NO: 675 - protein, 8 aa, Artificial Sequence
  CDR
ISVSVGVT

SEQ ID NO: 676 - protein, 19 aa, Artificial Sequence
  CDR
ATIGSMATIRKGATDAFDI

SEQ ID NO: 677 - protein, 6 aa, Artificial Sequence
  CDR
QRINSY

SEQ ID NO: 678 - protein, 3 aa, Artificial Sequence
  CDR
AAS

SEQ ID NO: 679 - protein, 9 aa, Artificial Sequence
  CDR
QQSYSTPPT

SEQ ID NO: 680 - protein, 8 aa, Artificial Sequence
  CDR
GGTFSSYA

SEQ ID NO: 681 - protein, 8 aa, Artificial Sequence
  CDR
IIPMFGIA

SEQ ID NO: 682 - protein, 16 aa, Artificial Sequence
  CDR
ARSSRSSSWYNWYFDL

SEQ ID NO: 683 - protein, 7 aa, Artificial Sequence
  CDR
QSISSSY

SEQ ID NO: 684 - protein, 3 aa, Artificial Sequence
  CDR
GAS

SEQ ID NO: 685 - protein, 9 aa, Artificial Sequence
  CDR
QQYYTTPWT

SEQ ID NO: 686 - protein, 8 aa, Artificial Sequence
  CDR
GYTFTSYY

SEQ ID NO: 687 - protein, 8 aa, Artificial Sequence
  CDR
IIPIFGTA

SEQ ID NO: 688 - protein, 10 aa, Artificial Sequence
  CDR
ARARFGAVDY

SEQ ID NO: 689 - protein, 11 aa, Artificial Sequence
  CDR
QSLLHSNGYNY

SEQ ID NO: 690 - protein, 3 aa, Artificial Sequence
  CDR
LAS

SEQ ID NO: 691 - protein, 9 aa, Artificial Sequence
  CDR
MQGLQTPHT

SEQ ID NO: 692 - protein, 8 aa, Artificial Sequence
  CDR
GYTFTSYY

SEQ ID NO: 693 - protein, 8 aa, Artificial Sequence
  CDR
INPSADTT

SEQ ID NO: 694 - protein, 22 aa, Artificial Sequence
  CDR
ARTPGNYGGNSLGYYYYYGMDV

SEQ ID NO: 695 - protein, 6 aa, Artificial Sequence
  CDR
QSVGTW

SEQ ID NO: 696 - protein, 3 aa, Artificial Sequence
  CDR
AAS

SEQ ID NO: 697 - protein, 9 aa, Artificial Sequence
  CDR
QQSYSSPLT

SEQ ID NO: 698 - protein, 8 aa, Artificial Sequence
  CDR
GYTFTDYQ

SEQ ID NO: 699 - protein, 8 aa, Artificial Sequence
  CDR
INPGGGST

SEQ ID NO: 700 - protein, 21 aa, Artificial Sequence
  CDR
ARGGVEYSSSWDYYYYYGMDV

SEQ ID NO: 701 - protein, 12 aa, Artificial Sequence
  CDR
QSVLYRSNNKNY

SEQ ID NO: 702 - protein, 3 aa, Artificial Sequence
  CDR
WAS

SEQ ID NO: 703 - protein, 9 aa, Artificial Sequence
  CDR
QQYYSIPVT

SEQ ID NO: 704 - protein, 8 aa, Artificial Sequence
  CDR
GYTFNSHW

SEQ ID NO: 705 - protein, 8 aa, Artificial Sequence
  CDR
ISAYNGNT

SEQ ID NO: 706 - protein, 14 aa, Artificial Sequence
  CDR
ASGDYPYYYYGMDV

SEQ ID NO: 707 - protein, 6 aa, Artificial Sequence
  CDR
QGVANW

SEQ ID NO: 708 - protein, 3 aa, Artificial Sequence
  CDR
SAS

SEQ ID NO: 709 - protein, 9 aa, Artificial Sequence
  CDR
QQSSSFPLT

SEQ ID NO: 710 - protein, 8 aa, Artificial Sequence
  CDR
GYTFSSYY

SEQ ID NO: 711 - protein, 8 aa, Artificial Sequence
  CDR
INPHSGGT

SEQ ID NO: 712 - protein, 13 aa, Artificial Sequence
  CDR
ARDSSGMGATIGY

SEQ ID NO: 713 - protein, 6 aa, Artificial Sequence
  CDR
QSVNRR

SEQ ID NO: 714 - protein, 3 aa, Artificial Sequence
  CDR
AAS

SEQ ID NO: 715 - protein, 9 aa, Artificial Sequence
  CDR
QQGNSFPIT

SEQ ID NO: 716 - protein, 8 aa, Artificial Sequence
  CDR
GFTFSSYW

SEQ ID NO: 717 - protein, 8 aa, Artificial Sequence
  CDR
ISGTAINT

SEQ ID NO: 718 - protein, 15 aa, Artificial Sequence
  CDR
ARVRRDSSGGGAFDI

SEQ ID NO: 719 - protein, 6 aa, Artificial Sequence
  CDR
QGISNN

SEQ ID NO: 720 - protein, 3 aa, Artificial Sequence
  CDR
AAS

SEQ ID NO: 721 - protein, 9 aa, Artificial Sequence
  CDR
QQSYSTPPT

SEQ ID NO: 722 - protein, 8 aa, Artificial Sequence
  CDR
GGTFSSYA

SEQ ID NO: 723 - protein, 8 aa, Artificial Sequence
  CDR
IVPIFETA

SEQ ID NO: 724 - protein, 9 aa, Artificial Sequence
  CDR
ARDTPNFDY

SEQ ID NO: 725 - protein, 6 aa, Artificial Sequence
  CDR
QSISSY

SEQ ID NO: 726 - protein, 3 aa, Artificial Sequence
  CDR
AAS

SEQ ID NO: 727 - protein, 9 aa, Artificial Sequence
  CDR
QQSYSTPLT

SEQ ID NO: 728 - protein, 8 aa, Artificial Sequence
  CDR
GFTFSSYW

SEQ ID NO: 729 - protein, 8 aa, Artificial Sequence
  CDR
ISGTSNYM

SEQ ID NO: 730 - protein, 12 aa, Artificial Sequence
  CDR
ARDRGFLGYFDY

SEQ ID NO: 731 - protein, 6 aa, Artificial Sequence
  CDR
QYISNY

SEQ ID NO: 732 - protein, 3 aa, Artificial Sequence
  CDR
GAS

SEQ ID NO: 733 - protein, 9 aa, Artificial Sequence
  CDR
QQSQSTPLT

SEQ ID NO: 734 - protein, 8 aa, Artificial Sequence
  CDR
GYTFTNYY

SEQ ID NO: 735 - protein, 8 aa, Artificial Sequence
  CDR
IIPIFGTA

SEQ ID NO: 736 - protein, 13 aa, Artificial Sequence
  CDR
ARGGYYDSSQFDI

SEQ ID NO: 737 - protein, 6 aa, Artificial Sequence
  CDR
QSISSY

SEQ ID NO: 738 - protein, 3 aa, Artificial Sequence
  CDR
AAS

SEQ ID NO: 739 - protein, 9 aa, Artificial Sequence
  CDR
QQSYSTPLT

SEQ ID NO: 740 - protein, 8 aa, Artificial Sequence
  CDR
EFTFSNAW

SEQ ID NO: 741 - protein, 8 aa, Artificial Sequence
  CDR
ISGTSRYT

SEQ ID NO: 742 - protein, 10 aa, Artificial Sequence
  CDR
ARDQDGRLDY

SEQ ID NO: 743 - protein, 6 aa, Artificial Sequence
  CDR
QNIGSW

SEQ ID NO: 744 - protein, 3 aa, Artificial Sequence
  CDR
RAS

SEQ ID NO: 745 - protein, 9 aa, Artificial Sequence
  CDR
QQSYSTPYT

SEQ ID NO: 746 - protein, 8 aa, Artificial Sequence
  CDR
GGTLSSYA

SEQ ID NO: 747 - protein, 8 aa, Artificial Sequence
  CDR
ISPYNGKA

SEQ ID NO: 748 - protein, 18 aa, Artificial Sequence
  CDR
AIRSIAAREGVYYYYMDV

SEQ ID NO: 749 - protein, 6 aa, Artificial Sequence
  CDR
QTISSY

SEQ ID NO: 750 - protein, 3 aa, Artificial Sequence
  CDR
AAS

SEQ ID NO: 751 - protein, 9 aa, Artificial Sequence
  CDR
QQSYSTPLS

SEQ ID NO: 752 - protein, 8 aa, Artificial Sequence
  CDR
GAAFNTVA

SEQ ID NO: 753 - protein, 8 aa, Artificial Sequence
  CDR
MNPNSGNT

SEQ ID NO: 754 - protein, 14 aa, Artificial Sequence
  CDR
ARTPAAAGTVYFDY

SEQ ID NO: 755 - protein, 6 aa, Artificial Sequence
  CDR
QSISSY

SEQ ID NO: 756 - protein, 3 aa, Artificial Sequence
  CDR
AAS

SEQ ID NO: 757 - protein, 9 aa, Artificial Sequence
  CDR
QQSYSTPFT

SEQ ID NO: 758 - protein, 8 aa, Artificial Sequence
  CDR
GGSFSRSS

SEQ ID NO: 759 - protein, 8 aa, Artificial Sequence
  CDR
IIPIFGAP

SEQ ID NO: 760 - protein, 18 aa, Artificial Sequence
  CDR
ARDHPHCSSTSCYYGMDV

SEQ ID NO: 761 - protein, 7 aa, Artificial Sequence
  CDR
QTISSSY

SEQ ID NO: 762 - protein, 3 aa, Artificial Sequence
  CDR
GAS

SEQ ID NO: 763 - protein, 9 aa, Artificial Sequence
  CDR
QQYGSSPLT

SEQ ID NO: 764 - protein, 8 aa, Artificial Sequence
  CDR
GGTFSNYA

SEQ ID NO: 765 - protein, 8 aa, Artificial Sequence
  CDR
ISAYNGNT

SEQ ID NO: 766 - protein, 18 aa, Artificial Sequence
  CDR
ARLSTVTTRPYYYYGMDV

SEQ ID NO: 767 - protein, 11 aa, Artificial Sequence
  CDR
QSLLHSNGYNY

SEQ ID NO: 768 - protein, 3 aa, Artificial Sequence
  CDR
AAS

SEQ ID NO: 769 - protein, 8 aa, Artificial Sequence
  CDR
MQGTHWPT

SEQ ID NO: 770 - protein, 8 aa, Artificial Sequence
  CDR
GGTFSSYA

SEQ ID NO: 771 - protein, 8 aa, Artificial Sequence
  CDR
IIPIFGTA

SEQ ID NO: 772 - protein, 16 aa, Artificial Sequence
  CDR
ARVPADYYYYYYGMDV

SEQ ID NO: 773 - protein, 6 aa, Artificial Sequence
  CDR
QSISSY

SEQ ID NO: 774 - protein, 3 aa, Artificial Sequence
  CDR
AAS

SEQ ID NO: 775 - protein, 9 aa, Artificial Sequence
  CDR
QQSYSTPLT

SEQ ID NO: 776 - protein, 8 aa, Artificial Sequence
  CDR
GFTVSSNY

SEQ ID NO: 777 - protein, 8 aa, Artificial Sequence
  CDR
ISGSGGST

SEQ ID NO: 778 - protein, 10 aa, Artificial Sequence
  CDR
ARGRFGSRDV

SEQ ID NO: 779 - protein, 11 aa, Artificial Sequence
  CDR
QSLLHSNGYNY

SEQ ID NO: 780 - protein, 3 aa, Artificial Sequence
  CDR
LGS

SEQ ID NO: 781 - protein, 8 aa, Artificial Sequence
  CDR
MQALQTPT

SEQ ID NO: 782 - protein, 8 aa, Artificial Sequence
  CDR
GGTFSSYA

SEQ ID NO: 783 - protein, 8 aa, Artificial Sequence
  CDR
IIPVIDTT

SEQ ID NO: 784 - protein, 14 aa, Artificial Sequence
  CDR
ARASGYPFGRWFDP

SEQ ID NO: 785 - protein, 11 aa, Artificial Sequence
  CDR
QSLLHSNGYNY

SEQ ID NO: 786 - protein, 3 aa, Artificial Sequence
  CDR
LGS

SEQ ID NO: 787 - protein, 9 aa, Artificial Sequence
  CDR
MQALQTPLT

SEQ ID NO: 788 - protein, 8 aa, Artificial Sequence
  CDR
GFTFSSYA

SEQ ID NO: 789 - protein, 8 aa, Artificial Sequence
  CDR
ISSDSYYK

SEQ ID NO: 790 - protein, 15 aa, Artificial Sequence
  CDR
AKGADYDFWSGYLDY

SEQ ID NO: 791 - protein, 6 aa, Artificial Sequence
  CDR
QGISSY

SEQ ID NO: 792 - protein, 3 aa, Artificial Sequence
  CDR
RAS

SEQ ID NO: 793 - protein, 9 aa, Artificial Sequence
  CDR
QQSYNTPWT

SEQ ID NO: 794 - protein, 8 aa, Artificial Sequence
  CDR
GYTFTGYY

SEQ ID NO: 795 - protein, 8 aa, Artificial Sequence
  CDR
INPSGGST

SEQ ID NO: 796 - protein, 21 aa, Artificial Sequence
  CDR
ARGDYYYGSGSDYYYYYGMDV

SEQ ID NO: 797 - protein, 6 aa, Artificial Sequence
  CDR
QGVTSW

SEQ ID NO: 798 - protein, 3 aa, Artificial Sequence
  CDR
AAS

SEQ ID NO: 799 - protein, 9 aa, Artificial Sequence
  CDR
QQANSFPLT

SEQ ID NO: 800 - protein, 8 aa, Artificial Sequence
  CDR
GGTFSSYA

SEQ ID NO: 801 - protein, 8 aa, Artificial Sequence
  CDR
IIPIFGTA

SEQ ID NO: 802 - protein, 15 aa, Artificial Sequence
  CDR
ARPRLAVAGGWYFDL

SEQ ID NO: 803 - protein, 6 aa, Artificial Sequence
  CDR
QDISNY

SEQ ID NO: 804 - protein, 3 aa, Artificial Sequence
  CDR
AAS

SEQ ID NO: 805 - protein, 9 aa, Artificial Sequence
  CDR
QQSFSSTPT

SEQ ID NO: 806 - protein, 8 aa, Artificial Sequence
  CDR
GFTFSSYW

SEQ ID NO: 807 - protein, 8 aa, Artificial Sequence
  CDR
ISSDSSYK

SEQ ID NO: 808 - protein, 12 aa, Artificial Sequence
  CDR
ARDGLRWDAFDI

SEQ ID NO: 809 - protein, 6 aa, Artificial Sequence
  CDR
QSISSY

SEQ ID NO: 810 - protein, 3 aa, Artificial Sequence
  CDR
AAS

SEQ ID NO: 811 - protein, 9 aa, Artificial Sequence
  CDR
QQSYSTPLT

SEQ ID NO: 812 - protein, 8 aa, Artificial Sequence
  CDR
GYTFTDHY

SEQ ID NO: 813 - protein, 8 aa, Artificial Sequence
  CDR
INPSGGYT

SEQ ID NO: 814 - protein, 18 aa, Artificial Sequence
  CDR
ARDRFRELLGSRYYGMDV

SEQ ID NO: 815 - protein, 6 aa, Artificial Sequence
  CDR
QDLSNH

SEQ ID NO: 816 - protein, 3 aa, Artificial Sequence
  CDR
AAS

SEQ ID NO: 817 - protein, 9 aa, Artificial Sequence
  CDR
QQYHDWPLT

SEQ ID NO: 818 - protein, 8 aa, Artificial Sequence
  CDR
GGTFSNYA

SEQ ID NO: 819 - protein, 8 aa, Artificial Sequence
  CDR
IIPVFGTA

SEQ ID NO: 820 - protein, 14 aa, Artificial Sequence
  CDR
ARVTAMGVGWYFDL

SEQ ID NO: 821 - protein, 11 aa, Artificial Sequence
  CDR
QSLLHSNGYNY

SEQ ID NO: 822 - protein, 3 aa, Artificial Sequence
  CDR
AAS

SEQ ID NO: 823 - protein, 9 aa, Artificial Sequence
  CDR
MQSLQTPPT

SEQ ID NO: 824 - protein, 8 aa, Artificial Sequence
  CDR
GYIFTNYW

SEQ ID NO: 825 - protein, 8 aa, Artificial Sequence
  CDR
IIPIFETA

SEQ ID NO: 826 - protein, 11 aa, Artificial Sequence
  CDR
ARLGDRGDFDY

SEQ ID NO: 827 - protein, 12 aa, Artificial Sequence
  CDR
QSISHSPNTRDY

SEQ ID NO: 828 - protein, 3 aa, Artificial Sequence
  CDR
WAS

SEQ ID NO: 829 - protein, 9 aa, Artificial Sequence
  CDR
QQYYRFPLA

SEQ ID NO: 830 - protein, 8 aa, Artificial Sequence
  CDR
GGTFSSDA

SEQ ID NO: 831 - protein, 8 aa, Artificial Sequence
  CDR
IVPAFGTA

SEQ ID NO: 832 - protein, 16 aa, Artificial Sequence
  CDR
ARSSSSWPYYYYYMDV

SEQ ID NO: 833 - protein, 11 aa, Artificial Sequence
  CDR
QSLLLNNGNNF

SEQ ID NO: 834 - protein, 3 aa, Artificial Sequence
  CDR
AAS

SEQ ID NO: 835 - protein, 9 aa, Artificial Sequence
  CDR
MQALQTPPT

SEQ ID NO: 836 - protein, 8 aa, Artificial Sequence
  CDR
GYFFTSYG

SEQ ID NO: 837 - protein, 8 aa, Artificial Sequence
  CDR
VIPISGTA

SEQ ID NO: 838 - protein, 10 aa, Artificial Sequence
  CDR
ARDENGAFDI

SEQ ID NO: 839 - protein, 6 aa, Artificial Sequence
  CDR
QSVSSY

SEQ ID NO: 840 - protein, 3 aa, Artificial Sequence
  CDR
GAS

SEQ ID NO: 841 - protein, 8 aa, Artificial Sequence
  CDR
QQYDNRPT

SEQ ID NO: 842 - protein, 8 aa, Artificial Sequence
  CDR
GGTFSSYA

SEQ ID NO: 843 - protein, 8 aa, Artificial Sequence
  CDR
IIPIFGTA

SEQ ID NO: 844 - protein, 9 aa, Artificial Sequence
  CDR
ARDNPDFDY

SEQ ID NO: 845 - protein, 6 aa, Artificial Sequence
  CDR
QGISNY

SEQ ID NO: 846 - protein, 3 aa, Artificial Sequence
  CDR
AAS

SEQ ID NO: 847 - protein, 9 aa, Artificial Sequence
  CDR
QQSYRTPIT

SEQ ID NO: 848 - protein, 8 aa, Artificial Sequence
  CDR
GGTFSSNA

SEQ ID NO: 849 - protein, 8 aa, Artificial Sequence
  CDR
IIPIFGTA

SEQ ID NO: 850 - protein, 14 aa, Artificial Sequence
  CDR
AGSPTGTPRVVFDY

SEQ ID NO: 851 - protein, 11 aa, Artificial Sequence
  CDR
QSLLHSNGYNY

SEQ ID NO: 852 - protein, 3 aa, Artificial Sequence
  CDR
AAS

SEQ ID NO: 853 - protein, 9 aa, Artificial Sequence
  CDR
MQALQTPIT

SEQ ID NO: 854 - protein, 8 aa, Artificial Sequence
  CDR
GGTFSSYA

SEQ ID NO: 855 - protein, 8 aa, Artificial Sequence
  CDR
INPNSGGT

SEQ ID NO: 856 - protein, 22 aa, Artificial Sequence
  CDR
ARDTSIAARLNPDYYYYYGMDV

SEQ ID NO: 857 - protein, 6 aa, Artificial Sequence
  CDR
QSISSW

SEQ ID NO: 858 - protein, 3 aa, Artificial Sequence
  CDR
AAS

SEQ ID NO: 859 - protein, 9 aa, Artificial Sequence
  CDR
QQSYSTPVT

SEQ ID NO: 860 - protein, 8 aa, Artificial Sequence
  CDR
GGTFSSYA

SEQ ID NO: 861 - protein, 8 aa, Artificial Sequence
  CDR
IIPVVGSP

SEQ ID NO: 862 - protein, 15 aa, Artificial Sequence
  CDR
ARHSIVGATATSMDV

SEQ ID NO: 863 - protein, 11 aa, Artificial Sequence
  CDR
QSLLHSNGYNY

SEQ ID NO: 864 - protein, 3 aa, Artificial Sequence
  CDR
LGS

SEQ ID NO: 865 - protein, 9 aa, Artificial Sequence
  CDR
MQATHWPLT

SEQ ID NO: 866 - protein, 8 aa, Artificial Sequence
  CDR
GYTFSDYY

SEQ ID NO: 867 - protein, 8 aa, Artificial Sequence
  CDR
ISAYNGNT

SEQ ID NO: 868 - protein, 18 aa, Artificial Sequence
  CDR
ARGSLDIWFREPGVYMDV

SEQ ID NO: 869 - protein, 11 aa, Artificial Sequence
  CDR
QSLLHSNGYNY

SEQ ID NO: 870 - protein, 3 aa, Artificial Sequence
  CDR
AAS

SEQ ID NO: 871 - protein, 9 aa, Artificial Sequence
  CDR
MQALQTPIT

SEQ ID NO: 872 - protein, 8 aa, Artificial Sequence
  CDR
GYAFTDYF

SEQ ID NO: 873 - protein, 8 aa, Artificial Sequence
  CDR
IIPIFGTA

SEQ ID NO: 874 - protein, 10 aa, Artificial Sequence
  CDR
ARVAYGAFDI

SEQ ID NO: 875 - protein, 7 aa, Artificial Sequence
  CDR
QSVSSSY

SEQ ID NO: 876 - protein, 3 aa, Artificial Sequence
  CDR
GAS

SEQ ID NO: 877 - protein, 9 aa, Artificial Sequence
  CDR
QQYNNWPLT

SEQ ID NO: 878 - protein, 8 aa, Artificial Sequence
  CDR
GGTFSNYG

SEQ ID NO: 879 - protein, 8 aa, Artificial Sequence
  CDR
INPSRGTT

SEQ ID NO: 880 - protein, 25 aa, Artificial Sequence
  CDR
AKGDIVVVPAAMFSLGPGYYYYMDV

SEQ ID NO: 881 - protein, 6 aa, Artificial Sequence
  CDR
QSISSY

SEQ ID NO: 882 - protein, 3 aa, Artificial Sequence
  CDR
AAS

SEQ ID NO: 883 - protein, 9 aa, Artificial Sequence
  CDR
QQANSFPIT

SEQ ID NO: 884 - protein, 8 aa, Artificial Sequence
  CDR
GFTFSSYG

SEQ ID NO: 885 - protein, 8 aa, Artificial Sequence
  CDR
IWSDGGHK

SEQ ID NO: 886 - protein, 10 aa, Artificial Sequence
  CDR
AREVRGWFDP

SEQ ID NO: 887 - protein, 6 aa, Artificial Sequence
  CDR
ENIGTW

SEQ ID NO: 888 - protein, 3 aa, Artificial Sequence
  CDR
KAS

SEQ ID NO: 889 - protein, 9 aa, Artificial Sequence
  CDR
QQSYSTPYT

SEQ ID NO: 890 - protein, 8 aa, Artificial Sequence
  CDR
GFAFSSHW

SEQ ID NO: 891 - protein, 8 aa, Artificial Sequence
  CDR
ISYDGSNK

SEQ ID NO: 892 - protein, 9 aa, Artificial Sequence
  CDR
ARDRGMIDY

SEQ ID NO: 893 - protein, 6 aa, Artificial Sequence
  CDR
QGIGSW

SEQ ID NO: 894 - protein, 3 aa, Artificial Sequence
  CDR
AAT

SEQ ID NO: 895 - protein, 9 aa, Artificial Sequence
  CDR
QQSYSTPFT

SEQ ID NO: 896 - protein, 8 aa, Artificial Sequence
  CDR
GFTFSSYW

SEQ ID NO: 897 - protein, 8 aa, Artificial Sequence
  CDR
ISSSSSYI

SEQ ID NO: 898 - protein, 9 aa, Artificial Sequence
  CDR
ARDQGWFDP

SEQ ID NO: 899 - protein, 6 aa, Artificial Sequence
  CDR
RAIGNN

SEQ ID NO: 900 - protein, 3 aa, Artificial Sequence
  CDR
TAS

SEQ ID NO: 901 - protein, 9 aa, Artificial Sequence
  CDR
QQSYSTPYT

SEQ ID NO: 902 - protein, 8 aa, Artificial Sequence
  CDR
GFTFSSYW

SEQ ID NO: 903 - protein, 8 aa, Artificial Sequence
  CDR
ISSSSSYI

SEQ ID NO: 904 - protein, 10 aa, Artificial Sequence
  CDR
ARDIAGYFDL

SEQ ID NO: 905 - protein, 6 aa, Artificial Sequence
  CDR
QSISSY

SEQ ID NO: 906 - protein, 3 aa, Artificial Sequence
  CDR
AAS

SEQ ID NO: 907 - protein, 9 aa, Artificial Sequence
  CDR
QQGYLTPYT

SEQ ID NO: 908 - protein, 8 aa, Artificial Sequence
  CDR
GYTFTDYY

SEQ ID NO: 909 - protein, 8 aa, Artificial Sequence
  CDR
IIPVLGAA

SEQ ID NO: 910 - protein, 9 aa, Artificial Sequence
  CDR
AKGWGAFDI

SEQ ID NO: 911 - protein, 6 aa, Artificial Sequence
  CDR
QSVSSY

SEQ ID NO: 912 - protein, 3 aa, Artificial Sequence
  CDR
GAS

SEQ ID NO: 913 - protein, 9 aa, Artificial Sequence
  CDR
QQYYSYPWT

SEQ ID NO: 914 - protein, 8 aa, Artificial Sequence
  CDR
GYTFSDHY

SEQ ID NO: 915 - protein, 8 aa, Artificial Sequence
  CDR
IIPILGTA

SEQ ID NO: 916 - protein, 13 aa, Artificial Sequence
  CDR
ATDIAVAGTGFDY

SEQ ID NO: 917 - protein, 12 aa, Artificial Sequence
  CDR
QSVLYSSNNKNY

SEQ ID NO: 918 - protein, 3 aa, Artificial Sequence
  CDR
WAS

SEQ ID NO: 919 - protein, 9 aa, Artificial Sequence
  CDR
QQYYGTPLT

SEQ ID NO: 920 - protein, 8 aa, Artificial Sequence
  CDR
DFNFKNAW

SEQ ID NO: 921 - protein, 8 aa, Artificial Sequence
  CDR
ISGNGAGT

SEQ ID NO: 922 - protein, 11 aa, Artificial Sequence
  CDR
ARVGETGAFDI

SEQ ID NO: 923 - protein, 6 aa, Artificial Sequence
  CDR
QSISSY

SEQ ID NO: 924 - protein, 3 aa, Artificial Sequence
  CDR
DAS

SEQ ID NO: 925 - protein, 9 aa, Artificial Sequence
  CDR
QQSYSTPPT

SEQ ID NO: 926 - protein, 8 aa, Artificial Sequence
  CDR
GGTFSNYG

SEQ ID NO: 927 - protein, 8 aa, Artificial Sequence
  CDR
ISAYNGNT

SEQ ID NO: 928 - protein, 14 aa, Artificial Sequence
  CDR
AKGDYGETGVDFDY

SEQ ID NO: 929 - protein, 6 aa, Artificial Sequence
  CDR
QDIHNY

SEQ ID NO: 930 - protein, 3 aa, Artificial Sequence
  CDR
TAS

SEQ ID NO: 931 - protein, 9 aa, Artificial Sequence
  CDR
QQSYNIPIT

SEQ ID NO: 932 - protein, 8 aa, Artificial Sequence
  CDR
GGTFSSYA

SEQ ID NO: 933 - protein, 8 aa, Artificial Sequence
  CDR
IIPIFGTA

SEQ ID NO: 934 - protein, 14 aa, Artificial Sequence
  CDR
ARVMVAGTGYYFDY

SEQ ID NO: 935 - protein, 11 aa, Artificial Sequence
  CDR
QSLLHSNGYNY

SEQ ID NO: 936 - protein, 3 aa, Artificial Sequence
  CDR
GAS

SEQ ID NO: 937 - protein, 9 aa, Artificial Sequence
  CDR
MQGLHTPPT

SEQ ID NO: 938 - protein, 8 aa, Artificial Sequence
  CDR
GFTFSSYW

SEQ ID NO: 939 - protein, 8 aa, Artificial Sequence
  CDR
ISSSGNYM

SEQ ID NO: 940 - protein, 12 aa, Artificial Sequence
  CDR
ATETYSYSSMDV

SEQ ID NO: 941 - protein, 6 aa, Artificial Sequence
  CDR
QSISSY

SEQ ID NO: 942 - protein, 3 aa, Artificial Sequence
  CDR
DAS

SEQ ID NO: 943 - protein, 9 aa, Artificial Sequence
  CDR
QQSYGTPLT

SEQ ID NO: 944 - protein, 8 aa, Artificial Sequence
  CDR
GYTFTENE

SEQ ID NO: 945 - protein, 8 aa, Artificial Sequence
  CDR
ISAYNGDT

SEQ ID NO: 946 - protein, 16 aa, Artificial Sequence
  CDR
AKEVRLDDDEMWYFDL

SEQ ID NO: 947 - protein, 6 aa, Artificial Sequence
  CDR
QDINNF

SEQ ID NO: 948 - protein, 3 aa, Artificial Sequence
  CDR
DAS

SEQ ID NO: 949 - protein, 9 aa, Artificial Sequence
  CDR
QQAYSFPLT

SEQ ID NO: 950 - protein, 8 aa, Artificial Sequence
  CDR
GFTFSSYW

SEQ ID NO: 951 - protein, 7 aa, Artificial Sequence
  CDR
IGTAGDT

SEQ ID NO: 952 - protein, 13 aa, Artificial Sequence
  CDR
AILRRDKVWPFDY

SEQ ID NO: 953 - protein, 6 aa, Artificial Sequence
  CDR
QSISSH

SEQ ID NO: 954 - protein, 3 aa, Artificial Sequence
  CDR
AAS

SEQ ID NO: 955 - protein, 9 aa, Artificial Sequence
  CDR
QQSYSSPVT

SEQ ID NO: 956 - protein, 8 aa, Artificial Sequence
  CDR
GGTFSSYA

SEQ ID NO: 957 - protein, 8 aa, Artificial Sequence
  CDR
IIPIFGTA

SEQ ID NO: 958 - protein, 14 aa, Artificial Sequence
  CDR
ARAAAAGTAWYFDL

SEQ ID NO: 959 - protein, 11 aa, Artificial Sequence
  CDR
QSLLHSNGYNY

SEQ ID NO: 960 - protein, 3 aa, Artificial Sequence
  CDR
LGS

SEQ ID NO: 961 - protein, 9 aa, Artificial Sequence
  CDR
MQGLQTPPT

SEQ ID NO: 962 - protein, 8 aa, Artificial Sequence
  CDR
GFSFSTYW

SEQ ID NO: 963 - protein, 8 aa, Artificial Sequence
  CDR
ISGGGIYT

SEQ ID NO: 964 - protein, 13 aa, Artificial Sequence
  CDR
ASMTYGDYYGMDV

SEQ ID NO: 965 - protein, 6 aa, Artificial Sequence
  CDR
QSISSY

SEQ ID NO: 966 - protein, 3 aa, Artificial Sequence
  CDR
AAS

SEQ ID NO: 967 - protein, 9 aa, Artificial Sequence
  CDR
QQTYSTPYT

SEQ ID NO: 968 - protein, 8 aa, Artificial Sequence
  CDR
GGTFSNYA

SEQ ID NO: 969 - protein, 8 aa, Artificial Sequence
  CDR
IIPIFGTA

SEQ ID NO: 970 - protein, 13 aa, Artificial Sequence
  CDR
AKDLGGWFNLFDP

SEQ ID NO: 971 - protein, 6 aa, Artificial Sequence
  CDR
QGVSSY

SEQ ID NO: 972 - protein, 3 aa, Artificial Sequence
  CDR
GAS

SEQ ID NO: 973 - protein, 9 aa, Artificial Sequence
  CDR
QQYRSFPLT

SEQ ID NO: 974 - protein, 8 aa, Artificial Sequence
  CDR
GYTFAGQY

SEQ ID NO: 975 - protein, 8 aa, Artificial Sequence
  CDR
INPSGGST

SEQ ID NO: 976 - protein, 15 aa, Artificial Sequence
  CDR
ARGDYSETYYYYMDV

SEQ ID NO: 977 - protein, 6 aa, Artificial Sequence
  CDR
QHINSN

SEQ ID NO: 978 - protein, 3 aa, Artificial Sequence
  CDR
GAS

SEQ ID NO: 979 - protein, 9 aa, Artificial Sequence
  CDR
QQSYTTPFT

SEQ ID NO: 980 - protein, 8 aa, Artificial Sequence
  CDR
GFTFSSYW

SEQ ID NO: 981 - protein, 8 aa, Artificial Sequence
  CDR
ISSSGGYL

SEQ ID NO: 982 - protein, 10 aa, Artificial Sequence
  CDR
ARDWGLTPDY

SEQ ID NO: 983 - protein, 6 aa, Artificial Sequence
  CDR
QSISSY

SEQ ID NO: 984 - protein, 3 aa, Artificial Sequence
  CDR
DAS

SEQ ID NO: 985 - protein, 9 aa, Artificial Sequence
  CDR
QQSYSTPLT

SEQ ID NO: 986 - protein, 8 aa, Artificial Sequence
  CDR
GFTFSSYW

SEQ ID NO: 987 - protein, 8 aa, Artificial Sequence
  CDR
ISGTAINT

SEQ ID NO: 988 - protein, 15 aa, Artificial Sequence
  CDR
ARVRRDSSGGGAFDI

SEQ ID NO: 989 - protein, 6 aa, Artificial Sequence
  CDR
QGISNN

SEQ ID NO: 990 - protein, 3 aa, Artificial Sequence
  CDR
AAS

SEQ ID NO: 991 - protein, 9 aa, Artificial Sequence
  CDR
QQSYSTPPT

SEQ ID NO: 992 - protein, 8 aa, Artificial Sequence
  CDR
GYTFSDFS

SEQ ID NO: 993 - protein, 8 aa, Artificial Sequence
  CDR
MLPISHIA

SEQ ID NO: 994 - protein, 11 aa, Artificial Sequence
  CDR
ARGGSSGWFEV

SEQ ID NO: 995 - protein, 11 aa, Artificial Sequence
  CDR
QSLLHSNGYNY

SEQ ID NO: 996 - protein, 3 aa, Artificial Sequence
  CDR
AAS

SEQ ID NO: 997 - protein, 9 aa, Artificial Sequence
  CDR
MQGAHWPPT

SEQ ID NO: 998 - protein, 8 aa, Artificial Sequence
  CDR
GFTFSSYW

SEQ ID NO: 999 - protein, 7 aa, Artificial Sequence
  CDR
IYSGGST

SEQ ID NO: 1000 - protein, 9 aa, Artificial Sequence
  CDR
ARGLGWFDP

SEQ ID NO: 1001 - protein, 6 aa, Artificial Sequence
  CDR
QHIGNS

SEQ ID NO: 1002 - protein, 3 aa, Artificial Sequence
  CDR
AAS

SEQ ID NO: 1003 - protein, 9 aa, Artificial Sequence
  CDR
QQSYGTPLT

SEQ ID NO: 1004 - protein, 8 aa, Artificial Sequence
  CDR
GGSFSGQA

SEQ ID NO: 1005 - protein, 8 aa, Artificial Sequence
  CDR
FVSLFGTA

SEQ ID NO: 1006 - protein, 13 aa, Artificial Sequence
  CDR
ARDREGLGWYFDL

SEQ ID NO: 1007 - protein, 12 aa, Artificial Sequence
  CDR
QSVLYSSSNENY

SEQ ID NO: 1008 - protein, 3 aa, Artificial Sequence
  CDR
WAS

SEQ ID NO: 1009 - protein, 9 aa, Artificial Sequence
  CDR
QQYYSIPYT

SEQ ID NO: 1010 - protein, 8 aa, Artificial Sequence
  CDR
GGTFSTYA

SEQ ID NO: 1011 - protein, 8 aa, Artificial Sequence
  CDR
IIPSFNAP

SEQ ID NO: 1012 - protein, 15 aa, Artificial Sequence
  CDR
ARVVPAAIVGWYFDL

SEQ ID NO: 1013 - protein, 11 aa, Artificial Sequence
  CDR
QSLLHSNGYNY

SEQ ID NO: 1014 - protein, 3 aa, Artificial Sequence
  CDR
AAS

SEQ ID NO: 1015 - protein, 9 aa, Artificial Sequence
  CDR
MQALQTPPT

SEQ ID NO: 1016 - protein, 8 aa, Artificial Sequence
  CDR
GGILNSYA

SEQ ID NO: 1017 - protein, 8 aa, Artificial Sequence
  CDR
IIPILGIA

SEQ ID NO: 1018 - protein, 11 aa, Artificial Sequence
  CDR
VENESGPLFDY

SEQ ID NO: 1019 - protein, 7 aa, Artificial Sequence
  CDR
QSVYSSY

SEQ ID NO: 1020 - protein, 3 aa, Artificial Sequence
  CDR
GTS

SEQ ID NO: 1021 - protein, 9 aa, Artificial Sequence
  CDR
QQYYSTPYT

SEQ ID NO: 1022 - protein, 8 aa, Artificial Sequence
  CDR
GYTFTSYG

SEQ ID NO: 1023 - protein, 8 aa, Artificial Sequence
  CDR
IIPIFGTA

SEQ ID NO: 1024 - protein, 20 aa, Artificial Sequence
  CDR
ARVMARRDGYNFKGGWYFDL

SEQ ID NO: 1025 - protein, 11 aa, Artificial Sequence
  CDR
QSLLHSNGYNY

SEQ ID NO: 1026 - protein, 3 aa, Artificial Sequence
  CDR
AAS

SEQ ID NO: 1027 - protein, 9 aa, Artificial Sequence
  CDR
MQALETPPT

SEQ ID NO: 1028 - protein, 8 aa, Artificial Sequence
  CDR
GFSFSTYG

SEQ ID NO: 1029 - protein, 8 aa, Artificial Sequence
  CDR
FVPIIGSA

SEQ ID NO: 1030 - protein, 10 aa, Artificial Sequence
  CDR
ARDYGGNLDY

SEQ ID NO: 1031 - protein, 11 aa, Artificial Sequence
  CDR
QSLLHSNGYNY

SEQ ID NO: 1032 - protein, 3 aa, Artificial Sequence
  CDR
AAS

SEQ ID NO: 1033 - protein, 9 aa, Artificial Sequence
  CDR
MQGAHWPPT

SEQ ID NO: 1034 - protein, 8 aa, Artificial Sequence
  CDR
GGSFSSWA

SEQ ID NO: 1035 - protein, 8 aa, Artificial Sequence
  CDR
IIPLFGTV

SEQ ID NO: 1036 - protein, 9 aa, Artificial Sequence
  CDR
ARDLPDMVS

SEQ ID NO: 1037 - protein, 6 aa, Artificial Sequence
  CDR
QSISSY

SEQ ID NO: 1038 - protein, 3 aa, Artificial Sequence
  CDR
AAS

SEQ ID NO: 1039 - protein, 9 aa, Artificial Sequence
  CDR
QQSYSTPLT

SEQ ID NO: 1040 - protein, 8 aa, Artificial Sequence
  CDR
GFTFSSYW

SEQ ID NO: 1041 - protein, 8 aa, Artificial Sequence
  CDR
ISGTAINT

SEQ ID NO: 1042 - protein, 15 aa, Artificial Sequence
  CDR
ARVRRDSSGGGAFDI

SEQ ID NO: 1043 - protein, 6 aa, Artificial Sequence
  CDR
QGISNN

SEQ ID NO: 1044 - protein, 3 aa, Artificial Sequence
  CDR
AAS

SEQ ID NO: 1045 - protein, 9 aa, Artificial Sequence
  CDR
QQSYSTPPT

SEQ ID NO: 1046 - protein, 8 aa, Artificial Sequence
  CDR
GFTFSDYY

SEQ ID NO: 1047 - protein, 8 aa, Artificial Sequence
  CDR
ISGFGEST

SEQ ID NO: 1048 - protein, 11 aa, Artificial Sequence
  CDR
ARLGAARAFDI

SEQ ID NO: 1049 - protein, 6 aa, Artificial Sequence
  CDR
QSIGSW

SEQ ID NO: 1050 - protein, 3 aa, Artificial Sequence
  CDR
AAS

SEQ ID NO: 1051 - protein, 9 aa, Artificial Sequence
  CDR
QQSYTTPIT

SEQ ID NO: 1052 - protein, 8 aa, Artificial Sequence
  CDR
GFTFSNYA

SEQ ID NO: 1053 - protein, 8 aa, Artificial Sequence
  CDR
ISGSGSYI

SEQ ID NO: 1054 - protein, 12 aa, Artificial Sequence
  CDR
ARRGSSWSNFDY

SEQ ID NO: 1055 - protein, 6 aa, Artificial Sequence
  CDR
QTISTY

SEQ ID NO: 1056 - protein, 3 aa, Artificial Sequence
  CDR
DAS

SEQ ID NO: 1057 - protein, 9 aa, Artificial Sequence
  CDR
QQSYSTPIT

SEQ ID NO: 1058 - protein, 8 aa, Artificial Sequence
  CDR
GYTFSTYD

SEQ ID NO: 1059 - protein, 8 aa, Artificial Sequence
  CDR
ISPSGGWT

SEQ ID NO: 1060 - protein, 19 aa, Artificial Sequence
  CDR
ARVNYDILTGQGRGYYFDY

SEQ ID NO: 1061 - protein, 6 aa, Artificial Sequence
  CDR
QDIADY

SEQ ID NO: 1062 - protein, 3 aa, Artificial Sequence
  CDR
KAS

SEQ ID NO: 1063 - protein, 8 aa, Artificial Sequence
  CDR
QQSYSTPT

SEQ ID NO: 1064 - protein, 8 aa, Artificial Sequence
  CDR
GYIFTRYY

SEQ ID NO: 1065 - protein, 8 aa, Artificial Sequence
  CDR
IIPMFGTS

SEQ ID NO: 1066 - protein, 13 aa, Artificial Sequence
  CDR
ARSSGYDSFKIDY

SEQ ID NO: 1067 - protein, 11 aa, Artificial Sequence
  CDR
QSLLHSNGYNY

SEQ ID NO: 1068 - protein, 3 aa, Artificial Sequence
  CDR
LGS

SEQ ID NO: 1069 - protein, 9 aa, Artificial Sequence
  CDR
MQGTHWPPT

SEQ ID NO: 1070 - protein, 8 aa, Artificial Sequence
  CDR
GYTFTSYY

SEQ ID NO: 1071 - protein, 8 aa, Artificial Sequence
  CDR
MNPNSGNT

SEQ ID NO: 1072 - protein, 14 aa, Artificial Sequence
  CDR
ARETSFDYYYGMDV

SEQ ID NO: 1073 - protein, 6 aa, Artificial Sequence
  CDR
QSISNW

SEQ ID NO: 1074 - protein, 3 aa, Artificial Sequence
  CDR
DGS

SEQ ID NO: 1075 - protein, 9 aa, Artificial Sequence
  CDR
LQDFTYPLT

SEQ ID NO: 1076 - protein, 8 aa, Artificial Sequence
  CDR
GYTFTNYA

SEQ ID NO: 1077 - protein, 8 aa, Artificial Sequence
  CDR
IIPVFGTA

SEQ ID NO: 1078 - protein, 18 aa, Artificial Sequence
  CDR
ARVSTNYYDSSGYYAFDY

SEQ ID NO: 1079 - protein, 6 aa, Artificial Sequence
  CDR
QSISSY

SEQ ID NO: 1080 - protein, 3 aa, Artificial Sequence
  CDR
DAS

SEQ ID NO: 1081 - protein, 9 aa, Artificial Sequence
  CDR
QQTYHTPWT

SEQ ID NO: 1082 - protein, 8 aa, Artificial Sequence
  CDR
GFTFSSYA

SEQ ID NO: 1083 - protein, 8 aa, Artificial Sequence
  CDR
MSYDGRHE

SEQ ID NO: 1084 - protein, 16 aa, Artificial Sequence
  CDR
ASTDYDIGGYSLPLDY

SEQ ID NO: 1085 - protein, 6 aa, Artificial Sequence
  CDR
QSVSSW

SEQ ID NO: 1086 - protein, 3 aa, Artificial Sequence
  CDR
AAS

SEQ ID NO: 1087 - protein, 9 aa, Artificial Sequence
  CDR
QQSYDVPWT

SEQ ID NO: 1088 - protein, 8 aa, Artificial Sequence
  CDR
GYTFTDYY

SEQ ID NO: 1089 - protein, 8 aa, Artificial Sequence
  CDR
IIPIYGTA

SEQ ID NO: 1090 - protein, 9 aa, Artificial Sequence
  CDR
ARTNWGMDV

SEQ ID NO: 1091 - protein, 7 aa, Artificial Sequence
  CDR
QGIPSNS

SEQ ID NO: 1092 - protein, 3 aa, Artificial Sequence
  CDR
GTS

SEQ ID NO: 1093 - protein, 9 aa, Artificial Sequence
  CDR
QQYYSTPWT

SEQ ID NO: 1094 - protein, 8 aa, Artificial Sequence
  CDR
GGTFSSYT

SEQ ID NO: 1095 - protein, 8 aa, Artificial Sequence
  CDR
IYPSGDIT

SEQ ID NO: 1096 - protein, 10 aa, Artificial Sequence
  CDR
ARAWARYFDY

SEQ ID NO: 1097 - protein, 6 aa, Artificial Sequence
  CDR
QDISNY

SEQ ID NO: 1098 - protein, 3 aa, Artificial Sequence
  CDR
DAS

SEQ ID NO: 1099 - protein, 9 aa, Artificial Sequence
  CDR
QQSYSSPIT

SEQ ID NO: 1100 - protein, 8 aa, Artificial Sequence
  CDR
GNTFTAYY

SEQ ID NO: 1101 - protein, 8 aa, Artificial Sequence
  CDR
INPSGGST

SEQ ID NO: 1102 - protein, 9 aa, Artificial Sequence
  CDR
ARGVGATNY

SEQ ID NO: 1103 - protein, 6 aa, Artificial Sequence
  CDR
QGISNN

SEQ ID NO: 1104 - protein, 3 aa, Artificial Sequence
  CDR
AAS

SEQ ID NO: 1105 - protein, 9 aa, Artificial Sequence
  CDR
QQGFNFPLT

SEQ ID NO: 1106 - protein, 8 aa, Artificial Sequence
  CDR
GYRFTDYY

SEQ ID NO: 1107 - protein, 8 aa, Artificial Sequence
  CDR
IQPTGGGT

SEQ ID NO: 1108 - protein, 19 aa, Artificial Sequence
  CDR
ARVGATVTKNYYYYYGMDV

SEQ ID NO: 1109 - protein, 12 aa, Artificial Sequence
  CDR
QSVLYSSNNRNY

SEQ ID NO: 1110 - protein, 3 aa, Artificial Sequence
  CDR
WAS

SEQ ID NO: 1111 - protein, 9 aa, Artificial Sequence
  CDR
QQYYSVPLT
